United States Patent Application Publication US 2024/0268394 A1 - sequence listing, part 3

SEQ ID NO: 23 - DNA, 432733 bp, Pseudomonas nodulensis
  misc_feature (401720)..(401744): n is a, c, g, or t
accatagagcattggaaccacctgatcccatcccgaactcagtagtgaaacgatgcatcgccgatggtagtgtggggtttccccatgtgagagtaggtcatcgtcaagattaaattccaaaacccctgactgctaacgcagtcaggggttttgttttgggcggtagaaaactcgagcgctacttatcccccgacaaatttgcacagttatttctgaaccagagcactagaataggcacctaaccatttttagagtcagagccctatctatgcccgatccggctgatgccctcgagctatcggatttaccactggacgacctggtggcatgccatgagtgcgacttgctgatgcgcaaaccggtgctcgccctcggcgaaaaagcccaatgcccgcgttgcggttacgagctgtacgctcaccgccacaatgtcgttgagcgaagcatcgccttggtgctggctgcactgttgctgtatatacccgcgaactttctacccatcatgcagctcaatctacttgggcagtcctccgaggacaccgtgtggagtggcgtcgttggtttatttgacactggcatgcaaggtgtcgcggttgtcgtttttctatgcagcatgggcatccccttgctcaagctgctttgccaattggcagtgctgctcagcatccgctggaatgtcgggcgcagttatgggctgctgctgtatcgcatttaccatcacatgaaagactggggaatgctggaggtctatttgatgggcgtattggtggcgatcgtaaaactcgccgacatggcctccatcacgataggcctggggctggtctgttttatcagcctattggtggttcaggtgttgcttgaggtggtgatgtcgccccaccagatctggcaagcgctatcaggagaggatgatcatgcgggcgattgatgcaggcattctgatttgtaccgaatgccacgagttgaacaaacaagacgctgatagcgacgagcaaacctgcacccgttgtggagcgctgatccatgcccgtcgccccaacagccttacccgtacctgggcgctgctgatcaccgcggcgatcttgtacattcccgccaacctgttgcctatcatgaccatcaattcgcttggtcagggcgaccccagcactatcatggccggggtgattcaactggtgcagcatggcatgtaccctatcgcggctgtggtgttcatcgccagcatcctggtgccaaccttcaagctggtcggcataggtctgctactgttctcggtgcagcgtcaccaaccgctatccgcgcaacaacgcattgtgatgtaccgcttcatcgaattcattggtcgttggtccatgctggatatcttcgtgatcgccatcctggtggcggttgttaactttgggcgacttgccagtgtcgaggccaatctcggcgcggcggcgttcgccagtgtggtgatcttgacgatgcttgccgcagtaacttttgatccccgactgatttgggataacacggagtcggacgacgaccatgagtgatttgcctaaagctaaaacccgcccagcctccaactggtcggccatttgggtgttgcctctgattgccctgatcatcggtggctggctggggtggcgcgcctattcccagcagggcatcgacatccaggtgcgctttgaaagcggcgaaggcatccaggtcaacaagaccgaagtggtttacaaaggcatgccggtgggcaaggtcaaggccctggccttggatgacgagggtaacaatcgcggggtgattgccaccatcgagatgaacaaggacgtcgaacaatacctgaagaccaatacccgtttctggctggtaaaaccgagtgtcagcctcgccggcatcaccggcctggaaaccctggtgtcgggtaactacatcgctgccagccctggtgacggtgagcccacgcgcaagttcaaggcgctctccgaagagccgcccttgtccgacgccaagcccggtttgcacctgaccatcaaggctgaccgtctcggttcgctcaaccgtggcagcccggtgttctacaagcagatccaagtgggccaggtcaaaagctacctgctctccgaagaccagagcaccgtcgagatcaaggtctatatcgaaccgacctacgccagccttgtgcgtaaacacacacgtttctggaacgccagcggcatcagcatcgatgcgaatctctccggcgtgaaagtgcgcagcgaatccctctccagcatcgtggcaggcggcatcgccttcgccacgccggagaaccgcaaggacagtccgcctacggatccgagcctgccattccggctgtacgaagatttcgacgccgccgcggccggcatcaaggtcaaggtcacactctccgacttcgaaggcctgcaggccggccgtacacccgtgatgtacaaaggtatccaggtcggcagcctgaaaacgctgaagatcaacccagacctttccagtgctaacgccgaactgacccttgatcccctggctgaagattacctggtgcaagacactcagttctgggtggtcaaaccgtctatttccctggcgggtatcaccgggcttgaagccttggtcaaaggtaactacatcgccattcgcccaggtgacaaagggacgcctccacagcgtgaatacgtcgcacgggccaaggcaccaccattggacctgcgttcccctggcctgcacatggtgctgttcaccgacaacctcggctccctggatgtcggcagcccgatcctctacaagcaggtcaaggtcggctcggtgcagagctaccagttctcgcgcaagaacaagcagttggtgatcggtgtccacatcgagaaggaatatgaaaacctggtcaacggttcgacacgcttctggaatgccagcggcgtcaccctgaccggtggccttactggcggcatccaggtgaagagtgaatccttggccagcctgatggccggaggcatcgccttcgaaacacctgagcagaacgttccgctgaaaaagcgcatcccgcgtttccgcctgtttgccgaccgcgaggccgccaaccagcacggtaccctggtgaccatcaaggtcgaccgcgctgacggcatgcgccctggtacaccggtacgtttcaaaggcctggacgtgggcaagatcgaaagtgtcgacctcagcgccgacatgcaatcggtgctgctcagtgcgcgtatcacccaggtagcggatcgtatcgcccgcgtcggcagtcagttctgggtggtcaagcctgagctgggcctgatgaaaaccgccaacttggaaaccctggtcaccggtcaatacattgaagtacaaccggcagcaaaaaacgccggcccgcagaagagtttcgtcgcgctagcccagccccctgaagccgcccatcaggaagccggcctgagcctgacactcagcgccgcccgccgtggatcgttgaaggagggcgtaccggtcacctaccgcgaagtcaccgtgggcaaagtcactggctacgagctgggccaaaccgccgaccgcgtgttgatccacattctgatcgagccgaaatatgccccgctggtccgtggcggcagccggttctggaacaccagtggctttggcctcgacttcggcctgttcaaaggcgcaaccgtacgcacggagtccttggaaaccctggtcgccggcggtatcgccttcgccacacccgatggcgagcgcatgggcaatgccgcccggccacagcaaaccttcccgctgttcgacaagtttgaagatgagtggctgacctgggcacctaaaatcccgctcggcaaataagcgccacaaaaaaggccgcgatccatagatcgcggccttttgcatttcagcgcagggcgtcagacttcatccagctccggctcatccgcctgcacattcatcgtcgccttcaccacatcatgacgacggatgtacttccagtccgcctcatcgatgtagatcccattcggcccgctgccaccttccaggtcgatcgccacctgggcggagacctgcggcttcacactggccaggatcggtacgaagcccagctgcaagctggtctccaacagggcagcctggttcttctcatcgatgtccgccgcttcgtcgaggtagtacggcaagcgcacacgcccggcctggtcacggtccatcaagtgcagcaacaagtacatgttggtcagcgccttgatggtcatggtggtgccgttggacgcggcgccatcgatgtcagtgtgaatcaccggctggccatgcactttggtgatctcgaacgccagctcgaacaagtccttgaggcccagttggttatggttggccgccaccagccgcgccaggtactccttggcttcttcgttcttgttgtcctgctcggcgctctggctcaggtcgaacaccgacagggtttcgccttcttcatactgaccggcgctgtggatgatctggtcgatatgcttgagcgcttccttgttcggcgccagcacgatgcggaagctttgcaggttggagacttggcgtttgttgatctcacggttgaacaacgccagttgatgctcaaggctgtcgtagtcgctgcgaatattgcgcaaggtccgtgcgatatcggtgaccgccgcacggcgggctttgccgagtgtcagcgcttcatccgtgcggtgcgcataagcgttgatcagcaattgcaggcgacgctcgacatcatcctcgctgtcgaacttggccacgcccttgaggcgaacctgggcgtacagcgcttcgatctggccatcggcgcgcagcaaaccttgccagctgtcctgatagtcattgagcagcggcagcaggttgtccatggagtcgtcgaccgggtccatgaacggcgtgccgaacggcaagtccgccggcaacaattgacggcgacgcaacgcgtcgtccagcgtacgttgcttggcttccatgtcaccgatctggcggccgaccaattgcagcttggccgacagttgctgaacacgctcggtgaacgcatcactggaacgcttcaactcatcctgcgccgcttccatctgcgccaggttttccagcttctcgccttcttcggcgctcagggtttgcgcacggcggaagtcttcaagggccttttgcgcatcgagcacctgctggtacagcgcttcggtctgcgtcttgctcgcggcacggtcggaggcgacagcctgttgggttttcagctgcttgagttctttctccaggcgctctttctggtcgcgcaacgccgcgcgatccgccagggcctgcaaggccggtggttcgatgtgggagatgtcgatggacagccccggtacttcaaagcgctcacccttgaagccgtcgagtatctgctccagggatttgacccactggccgtcctcgtcaagcgtgatgccatgttcgcccaacggcaggctgaacaacgaactgttgaacaggcgcatcagacgctcgacgtcctgctgtgagaattcctcacgcagtttggcgtagctgttgttgtcggcgtggtcgagttgttgcttgaccgacttcaagcgcttttccaggtcgcgcaggcgctcatccagatcctcggcgctgaactgccgcgactgcgcaagggcacccgccaactcatcgtgggcatccttggccgccagcaactgctgctccagcaccttcacgtcatccaccagcgcaaagcgatgcttgagcaccgacaactcgcccaaccaacgctggataccgctgatttcccgctccaggcgcatcagctcctgggtgccgccacgctgatcgttctgcagcgcgtcctgctcgttgcggtagtgttcggcctgaatcgtcagttcttccttgcgtgcactggcgtagtccgaccaggtgcccagcaacgagtcgagcaatggcgacaggcgatgcaatttgccacgcagcacgtcgcgctgacgaacaccattggacagcgcttcaaccagagggccggccgcgaccagggagttgtagtcctgctccatgcgtcgcacatcgcggaaggcttcttcgcacgccgcgatgtagtccacgctacccgaacgcaggctgtgctcaaacgcatccaggaacaattgcttgagcttggccgcggtgatttcacgcatgtgcagcaggttgataaacagtgcgcggaaggtcttcaggctctgctcgctggtggagcgcagtggaatcaacgtcaggtccagcgggatcgacgtatgcccgcccaccagcaagcggcgcagttcatccggcttgagttcgtaggctttcaggccttcgcgctcgaggttggtgaacagctccttctgacgcaggcaggtgtcattcttctggtagtgcgccaggtccagcttgccggcataggcaaagaactggtgaccgaaaccaccgcccgggccgcgcccgaccacgccgattacatgggggccgtggggcagcgagacttccacgaggatgtagctggtgtcggtggcgaagtagaagcgccgcgattgttccagggtgtacttgccgaaactcatgtccgacatgcgcgccaggatcgggaactgcaaggcgttgatcgaggcggatttacccaggttgttcgcgccatacacggacagcggctcttccagcgggaacaggcccaggctgtagccggcggtgttcaatagggcgaagcggcggatgccgtagcgttccttgctcatgcatcggtctcctgttcttcggcaatggcgcgggccagggcgtcttcttcgctttcatcggcgaagtcgctcaagtcgagtgggtcatcggttttcagcaatttctcatcgctgtcttcgtcgatgatcaccggtgccggcagcggcaacacgctgtgcacgctggctgccaggtcgcggtcttgctgcaccgacaggcacacatcgaggaagcggtgcatcggcggcaggaagcgatagatgccgttgtcttcgctggcaaaacccagctgggtcatgcggcgcatgattttttcttcgagttcttcctgggtctgcacctcggcctggataaacaggtcgcggtacttctccagcaacgatggcagctcatcacggccgaggctgccaccgtcaagcacggcgatcgggtcgcggccctggtcggccaggtgctcgacgatgatgaaggtgaacagcgccaggcgctgggcggtcttgttgacctgcgcggcggccacggcagtgtccggcacgaagtagtagaagccccgcgtgtcgcacaccagctcgaagcccagggccttgaagagcgtgcggtactggtcctggaagttcgacagctgtgcgtacagctccgggtcgcggcggctgacgtggtaacccttgaacagctcgcgaaagatcggcgccagctgggacagttcggatagatcaagatgcatgaggtgtactcgcagggtgctcggcggcgtcggatccggccgggagcagggcgaatgagcgcaggctgacctggtgctcgtgtgtgtggtaatcgcggcgttccaggcgttcgcgcttgaagcgtttttcccgcgagagccgcgagaaccagtacagcaattcgtcggtggcgccgtccggttcctgctccagcagccaggtcatcaggtccggcatcggcagcgcgtcttcgcagcgctcaagcatctccttgaccgtgcgcggtgcacgctgggcgtcgcccttgtgggacttgtgcgccttgggaaagcgcgccggtttcggctcgaaattcgccagggcatacacataggcttccacctggctggcgctgccgaggaaggtgctctgcggccgggtaaacatcggcatcgccgcttgcggcactgcgtccaggcctttgcggcgaatggccgacaaggccagcgccgcaccacgggtcacggcgttgtgccgacgcgcttcttcacgcagcggcagcagcagttcgcgggcatgacgcaaggtcaactgggcgctggtctgcatctccaggatgcgcgcgtgggtgcgcagcaacatgtcgtcgtccaccaggtggccgaggcgctgctgttcggtgagcatgcgcagcaacacattttccaccttgcgcacgccttgttcgaaggcgccgtcggcgttcaccagctggatcatcggttcgacgtattcgtcccaggtcgccaggacctcggcataacgctggcgcaacgggatctgccggtcgctggtcttggcgcggtcggccacggcggcgagggcctgttcgtcgttggcgagttttttcagcacatcgcgcacgcgcatgtcgagcaggcgcagttgacgggccaggtcgtggccatcgcggatgtcgaaggcgtcctggatgtaaccggccaggcgctcgaggtggcgcaggtaggcttcgatttccaggcacaggccaagccggtgctccttgcgaagataagccaggaagtcgtggatctgtgcgttgagctcgaaacggttcgggctcttggcgacaggcaccaggatgtccaggcgaatccacacgtccagcaggctggtgatgtcctgtggcgtgctgtccagttgttgggcggccagttgtgcgcgcagttcactcaggctcagggtgccctggtcgaagtgttcgcacagtggctcaagcagggcccagtgttcggcgagggcgcgcaagacgcgcttgggttcgatcatcggaatggccagctggttggcgattaaaagtcgcgattgtactgcatcggacgcgggatttatccacagccggtcagtacgcagtgggcgattgttgccgaacagcggtagaatccccgctctttagttatccacaagtggccgagctgtgcttatcgagtcccgacgtcgcgcttacttgaccgccatgcaggtggtcaactggctgccccgcaccgaactgccgtttgccgcgccgtcgcggcccgagctgttgcaggcgcttgagccctatgaggcgttcgagtcttcgggcgaggaagcggctgcgccggtggctgtggtcaagcccacgccggaggcgcgaccggtggtcgaacgggccaagatcgaagtgccgcgccccgcgccggtgaccaaggccgccaaggtggtcgaagagacggccccggtggtcaaggccccggtggtgccgccaccgcgctttgccctgcaattgctgcgtgccgggcgctgcctgctgctggtggagttgcccaccggcgaacgtttccagacccgcgaccccgcctacatgctgctcaaggacatgctgcgcgccgccggcctgcccgacagcccgcaaatcgtcggcgacccggtgcgctggccgctgctggtgcgtggcaacatggatcaaggccccgaggccgcacgggattttgtgcaaggttttgtgtctgcgcgtctggaagacgagccttgcgcgtgcctgtggctgatcggcctgcctgccgtgcgttttgccggcgaggccaatgccgaagcctggtaccgcgagttgcaggtcgaaagcctgggcttggtgtgggccttgccgggcctggaattattaatggaagagccacagcgtaaggctgatgtctggcaagccatgcgccggctgatggcgcgctggaaaacaaccgatgagtgaggctttatccttccgcccgatgaccgaggccgacctcgacgccgtgctgaaaatcgaatatgcggcgttcagccacccctggacccgtgggatctttctcgatgggctgggcaaataccagatctggctgatgtttgaaggtgagcagcaggtggggcacggcgtggtgcagatcatcctcgacgaggcgcatctgctgaacatcaccgtcaaaccggaaaaccagggacgcggccttggcctggcgctgctggaacacctgatgtcccgcgcctatgccgccagtgcgcgggagtgtttcctggaggtgcgcgacagcaataccggcgcgtttcgcctgtatgagcgctatggcttcaacgagatcggccgtcgccgggactattacccggctgtcggtggccgcgaagatgcggtcgtcatggcctgcaccctggtcgactaaatacataggccattgtgggaggtggcttgcccccgatggcggtgtaccaggcaccttatcagtctgatatgccgctatcgtgggcaagccccctcccacttttagggcacgttttgtcagcggttaccgtctactggatcaatatctgccaattcggcctcatccaggccattgcccccaccgatctcatcctcatcgacgatactcaggtcccagtccgccggttcgctttcgcccgcttcctgagcatcccgtgctccatcttcatggatcagcgtttcagggctcatgtcatcgtccgtcgcttcatggtcttcggttgaagccccggtcatcccggcctcccgcacccgttcgtcaccgatatgcgtggtgggcgcgtcttcttcaaaatccagctcacgcatcgagcccatgcgatcttcattatcatcaatcggttcgggctgtgtagcgccgtagggacgtcgtgattcagtcatggccaatcctcatactgtggggcttatagtgtgtggacaggcacggagggctaaagattcaagctgattcgtgctgagcgtgacctggacgcggggttgtcagtcacaaaactgcgcatcattcctgaggctttccctgatgaacgaactacaagacctgcttgataacaatgaacgctgggcggacgcgattaaacaggaagatcccgaattcttcgccaagctcgcccgccagcaaaccccggaatacctgtggatcggctgttcagacgcccgcgtcccggccaacgagattgtcggcatgctgccgggtgatctgttcgtgcaccgtaacgtcgccaacgtggtgctgcacaccgacctcaattgcctgtcggtgattcagtacgcggtggacgtgctcaaggtcaaacacatcctggtcaccggccactatggctgcggcggcgtgcgcgcctcgatgcaggaccgccagttcggcctgatcgacggctggttgcgcaccattcgcgacctctactacgagaaccgcgacctgctggcccagttgccgactgaagaagagcgcgtcgaccgtctttgcgagttgaacgtgatccagcaagtggccaacgtcggtcacaccagcatcgtgcagaacgcctggcaccgtgggcagagcctgtcgatccacggttgcatctacggcatcaaggatggccgctggaagagcttgaataccaccatcagtggtttcgaacagttgccaccgcagtaccgcctgcgtccgctgggcgaagcctaagatcgtttacggtcgcgccactgagccatgaacgcctgcccctcggcgttcagcggctcatcgcgaccggtaatccagccccggcagttcaactcgccgcattggcaggcaaactgttggaacagcacgtcttcggtgctggcgtaatccatggtcagcagggtgccggccatgatctcgtgcaaggtccagacctccaggtagtgcaagtcgagaaacacgttcggtttgcacgagtgcgacagcaggccgctgaaccagcagtcgtagaggtggatgcgcgacgaaagctgcaaagtgtgcaggcatcgctcgctcagggcatagccggagatcttggcgatgcacacgcggctgtcaaaggccatgctcgccttgattccgacgcccacgccagcaatgttgtgcaccacctcgaattgcttgcgagttgggtagccttttccgagtttggacttgaaagggtaaaggcagtcactcgcagcggttttagccttatccatggcctgagttttcataactctcctggtttaggctgcatcgacctgcgggtggtggctgactaccagtcttgcagcggatgggcgcggctcaagactcgctgaacatggagccgatttctactgtcaatgttgacagtagaaatcggctgttttttgtgtgatttacagcgccggcgcactgaccgtcggggttggggccgcattgcgcagctgtttcaattgggtcttgatggtgggcgtagcgcacttggcattcgcgtcttgcggggaaagattgcgcaccgaggtgtagaacagctcgcacgtctgctccttgcgcgtgacttgccaggtattcatgcaggccttgagcaagacattcggatcgctcgcgggtttctggcccatcccggcctgccagcaggcggcgctcaggtcctggcccatgaccttcaagccggcctcgtcggctttctgttcgttgccgtcgtaggtgtcggggctcgcggcataccagatgtaactggggtggttcgatcccagcaccgaaacggtttggccggcggcggggctgatctgcgccaggcccagcacgcctaccgtctgcccgtattgttgcttgatccagctgcgcaccggtgcgccgaacgccaccatcggcaacgcccctttggccggcaggctcaactcccggaccatgcgcgtctggtagtcggtgaagtagctgtagacggtttccaggtccttgcctgcattggacggcgcggcgatgggcgcgatatcgatgatggtctggtaagccggcgtttcggtggccgggatgccattgtcggtcaacagggtagcccagcggtcggtggtggccgattccaggtagttctgggcctgggtcagcgagtagtccggcgggaagtgcagcagctcgatgcttttgcgattttccagggccatgcccagcggcaggaacaggtaccagttgtaggcccatttaccatcgctgttgagcttgctggcgccttgataggccaggtcggcggtattgagcagggtggtcagcggttggccataactgtccggcacgccgctgaaggtcgccgatacctggccgtcatgggtcttgacgctgactttcgcccggctgtacccgtcccgttgcaggctctggttcaagtaatgctcggcagtctgttccagcgtccagggccgaaagcagatcacattgcagttattggggaatgcgaacagctgagtcacgcgctgcgtgctccccagcggcacctcgatgtcggcctgtaccgccgcactcgccatcagtgcggccagggtgaaggacagcctggttggtttgaacatggttgtttccttgtcagcgaaagcccgtctgcgcggggtgaaagcccaccccaacacagtagcggctgaccaggaaaaccgcgtgctaaatcaccgggcgtgtcgctattggataagaaaacctacacgctgaactgcaacgcgttgctcaagtcgcccatgggtttctgtccgcgggcgatcatcgcgtcatcgcgctgcttgagaccgtccagggtttccagctggaacacccgggtgatcaggcgcaggatcgacgcggtgtcgtacaccgtatggtccaccgtgcctttgcgggcgaacggcgacaccaccagcgccggaatccgcgtgccagggccccagcggtcgcccttgggcggtgccacgtggtcccaccaaccgccgttttcgtcgaccgtcaccaccaccaccatgtttttccactgcgggctctcttgcagcaccttcaaggcacgggcgatatggcggtcgcccgaggcgacgtcggcatagcctgcgtgcatgttcaggttgccctggggtttgtagaaggtcacggcgggcagcttgccagcctgggcgtcggcaaagaacttgttggtgctcgactcgtcccccaaaccgccatcgcgcaggcgcttgtcgcgctcggtgcggttctcggggccttgctgcttgaagtaattgaatggctggtggtgatactggaagttcgggattttcggaataccgcccgaatccttgaactggtccagcgtcgcttgccacgcgccggcgtaccacgcccagtcgacgttcttcttcgacagcttgtcgccgatgtgttcgtgggtttgcggcaccagcacgttgggcaggtcaggcttggagtagtccgggttttccgggtcgcggatccaggtcggccagtacggtggagccagggtgttcacgccgtagccatccggggtcagcgcgctggggccgaactgcggcgggccggtcatcgcgctggcgggggacttgtccaggggcttgaggcgcgggtcggtcgggtcatcgctttgcagcgtggcgatctgcgccttggccaccgattgcgcggcattcgggtaaaacggcgcggtggcgctgatcaggtattggtgattgaggaacgagccgccaaacgccccctggaagaagttatcgcagagcacaaactccttggccacatcccacaggcgcagggcataacgactctgggtgtaatgccccatcaccaggccgccggagtcggcccaggcgacgaagttgtcattcttgccgccgttgatctgcatctggttctggtagaacacgtgccacaggtcacgggtgaccaggctcaggggcaggtcttcggcgttcgggcccttgagggcgaagggtgcgttgggcaggttttcctggaattgcacttcgctggggtaggtcaccccgtccaccgtttgcgggccgacttgcagcacgccgccccacgtcggaggcaggctggtcaacaagctgccatcgcggtcacgctgctgcgtgtcggcggcggatagcgccgacagcggtttctcaacacccgggaagtccgcaaacaagttgttgaaactgcggttttcggcgtagatcaccaccacggttttcacctgctcacgcaaggccttgtccaactcttgcggcgtcagcggccgcggcaccggtttgcccggtgcttcgctggtattgccgcaggcactcagggtcgcgccaacccccagcaccgccgcgccccccaggaaacgccgacggctggtgtcgacgggcggttgggctgcggaatcgggggaagggcgctcttcgtgctcgtcactcattgcgggggagtccttggcgagatgttgcaagatatttcgcaggacggtagcaatgcaatgtgacggaacgaagacagtgatttgaatcagaggatcacagcagacgcagtgccaactcgctgccggcgcgcaagtactcgacctgggccgtcaccgcgtccttgacgatggcctcgcccgtgtcggtcagcctggctttctttgcatcgatgacactgctctgcaacaactgcatggccacgtcgatcgatttctggaaggcggtcacgttgttgtgcaggccgaactccttgaccacagcggccatgcggcgatctgcgtcgtcgcgcaaggtcctgtattcagtgactgaaacgttgccgtcctggtaaatatcagtgatcaactcttccagtgatttggataggggcgtcatcggagtttccttggtgctaggtgagtaggagtccgagtcaggttaatcaacggtattggtgggtgaagccgggggttgccgttgtctggagtaggacaaccccacgcgttagatcagaaggtgcttttagggcatcaccggcggcaaatacttcaacgtcgtccccagcgcccacagcaggaacaacaccagcggcgtatgcaccagcaactgcacgaacgagaatccgatcaagtcccgtgccttcaaccccaatacccccagtagcggcagcatatagaacgggttgatcaggttcggcagcgcctcggcggcgttgtagatctgcacggcccagcccaggtggtattgcaggtcattggccacttgcatcacgtacggcgcttcgatgatccacttgccaccgcccgacgggatgaagaagcccagcaccgccgaatacacgcccatcagcagcgcgtaggtgtcgtgggacgcgatggaggtgaagaaggtcgagatatggtgcgccagggtctggccgtcaccgcccttgaccaccgtcatcagcgcggcgatcgagccatacagcgggaactggatcagcacgccagtggtggtcggcaccgcccgcgccactgcatcaaggaagctgcgcgggcgccagtgcagcagggcgccggtcatgatgaacaggaagttataggtgttcagccccgagattgcgctgatcgccggtttggtcgagaactcatggaacagccaaccggccgccagcaatgccagcaggatggtcagcaaggggctgtgctcgagccactcacccgggcgggcgggggcttgcagtttgggcaggttgaacgccgggtcgaccccacaggccttggcatcgcgggcgctgttcgggccgggtgcggtggcgtaggcgatgatcagcgacaccacgatcaacgccagcaacagcacgccggattgccacaggaagatggtatcggtgaacgggatcacccccgtgatcgacagaatcgacggcggcaggctcgccgggttggcctgcaactgagccgccgatgacgacagccccaacgcccacacggcgccgagccccagatacgccgccgcaccggcagcacggtaatccatgcgcagatccgtgcgacgcgccagcgcccgtaccagcaaaccgccaaacaccaaggataagccccagttcagcaacgaggcgaccatcgagatcagcgccacccaggccacggctgagcggccgttcttcgggatacgcgccaggcggtcgatcagtctcacggcgggcggcgagcttgccaccacatacccgccgatcaccacgaaggccatctgcatggtgaacgggatcaggctccagaacccatcaccaaaagccttggcggcttcggtcggtgcagcgcccatgcccagcgtcgccacggcgacaatgatcacggcgagggcggcaaatacccaggagtctggaaaccagcgctcggcgaaattggagcagcgcagggcaaatcgggcatagcggctttcttcgatagcatcggccatgagtctttcctcttatagttattagggggcaggcgattttccggcatgttccgctacggcctttgatatgggaatgcagttatcttcatcgatccatgaggaaaacaaatatatctgctgtgattgccatcattgggctcagctcataacctgcacgccattttgtttgtctgccgagcctctacatgactgccacctttcctacgcaggcgcagcgcttttcccgctccgactacaaaaccctgggcctggccgccctgggcggcgccctggaaatctacgacttcatcatcttcgtgtttttcgcgctgaccttgagccaactgttcttcccgccggaaatgcccgagtggctgcgcctgctgcaaagcttcggcatctttgtcaccggctacctggcgcgcccgctgggcggcatcctgatggcgcacttcgccgatcacctggggcgcaagcgcgtgttcagcctgagcatcctcatgatggcgttgccctgcctgctgatcgggatcatgcccacctacgcgcaaatcggttacttcgccccgctgatcctgctggcgctgcgcgtgctgcaaggcgcagcggtcggcggtgaagtgcccagcgcctggaccttcgtcgccgaacacgcaccgccccatcatcgcggctacgccctgggcttcctgcaagccggcctgacctttggctacctgctcggcgccctcactgccacactgctggcgcaagtcttcacccctgcagaaatcctcgactacgcctggcgcttcccgttcctgctcggcggtgtgttcggcgtgatcggcgtgtggctgcgccgctggctcagcgaaaccccggtgttcctcgaaatgcaggcccgccgccatgccgctgccgaactgcccttgcgcaccgtgctgcgcgaccaccgcgccgtgctgctgccggcgatgatcctcacctgcgtgcttacctccgccgtggtggtgctggtggtcatcaccccgaccatgatgcagaaaaccttcggcatgagccccagccacaccttcgccttgagcgccttgggcatcgtgttcctgaatatcggctgcgtactggccggcctgctggtggaccgcatcggcgcctggcgcgcggtgctggtctacagcctgttgctgccggcggggatcgcggtgctgtacgccagcctgatcaacggcggaatctggctgggcgcggcgtatgccgtggcgggcctcagttgcggcgtggtcggcgcggtgccgtcggtaatggtcggcctgtttccggcgcaggtgcgggtgtcggggatttcctttacctacaacattgcctacgcgctgtgggcgagtacgacaccgttgatgttgattgcactgatgccgaccagcccgtggatctgcgtggggtattgcgtggtgatgggggcggtgggggtggggagtgtggcgttgtttggaaaacgccacacgttggctgcgtcggattaagtcaagaagtgccaaagcaccagcgtccccaccagaccgacgactgagacaatcgtctgcaacaccgaccacacccagatcgtctgcttcaactgcaagccaaagtactcacgcaccatccagaacccggcgtcgttgacgtggcagaagaacaccgagccggcgccgattgccagcgcgaccaacgagctttgcgtcaccgccagcccggccatcatcggcgcgagaatgcccgccgtcgtggtggtggcgactgtcgccgaacccgttgcctggcgcaacgcaactgcgatcaaccacgccagcagcaggtacggcatgtgcgcgccttcggcgaccttgctgatggtctggctcacaccagcatccagcagggtttgcttgaggccaccgccagcgccgatggtgagcagcaagacggcgatgggggcgagggctttgcgcagggtgttgcccacgtcggccctaggcatgccagcggcccagcccaggcagattacggcggcgatcacagccaggccgagggcgatcagcggttcgccgagaaacttcaaggtcaggccgagggtgctttccgccggcagcgcgaccttggccaaggtgctgcccagcatcaggatcaccggcaacagaatgatcagcaacgacacgccgaagcttggttggcgcggcgccttgggcggtgcgctgaacagtgcgccgatgtccgccggttcatccacctgcaggcgcttggacagccagttgccgtagatcgggccggccaggatcaccgctggcaccgccaggcagaagcccagcaacatggtcaggccgaggtcggcgtgtaacgcgcccaccgcaatcagcggccccggatgcggtggcatcagggcgtgcagggtggtcatgccggccagcgccgggatggcgattttcagcagcggctggttcgaccgcttggccattacaaagatgatcggcaccatcatcaccaggcccacttcgaagaacagcggcaggccgatcaccatcgccacgagcgccatcacccacggcaatgacttgcccttgcccagcccgagcagggtggtggcaatgcggtcggccgcgccggattcggccatcaatgcgccgagcatcgagcccagggcaatgatgatcccggcctcaccgaggatcgccccggcacctttgctgaaggccttggcgacttcttccggcggcaggccggcgccgacaccggcgatgaaggtgccgatcaggatcgacaggaatggcggcaacttggtcgcgctgatcagcacgatgatgctggcgatggccagcagtacacaaaacataaggcgagtgtcgtgaaccatccacgcggcagtcgataactccaaggcgggactccttatcgaacaggttgggagaattgtttctttttgtttcctgcccgaaaagcatacctgataccgcgatagccaagtgcttatgtatcgttttggtgcgatcagcgacaggccgccgaaatgcccgccgcagagccattgctgtcggatttgtaatctttgctccaccgccctgataagtcgtgaccgctacattgccccggctagtatttcttgggcgtggaactctcgttatggcaatttccgttagaaaactcttgggggcgggggcgttgtggctggtcgctagcgctgcccaggcacagaccctcaccctcaattcagccctgcaaaccgccttcgccaataaccctgacctagcggccgcacaatgggaaatcgacatcacccagggcggccgccagcaggccggtttgatccccaacccggtgctctcctgggatgccgaagacacccgtcgcaactctcgcaccacctccatcaagctcagccagaccctggaactgggcggcaagcgtggtgcgcgcattgacgtggccagccgtgcccaggacgccgccgccctgaccttggaacagcgccgcaacacactgcgcgctgacgtcatcgacaactactacggcgcgttgcgtgcccaggagcgcctcgacctggcgcagcgttccatggctgtggccgagcgcggcctgggcgttgccaatggtcgcgtcgcggcgggcaaagcgtcgccggtagaggcaacccgtgcgcaggtacagctatcggaaatgcgcctggaattgaaccgcgcacaggtcggcctcaccgacgcctatcgccgcctggccgcgagtactggcagtgccggcgcggatttccaggtcgtcgccacacagccccaatccacaccgcccctgccgccggttgcgcagttgttgacgcgccttgagcagaccacggaactgcgcctggccgaactgaacatcctgcaaaacgaagccagcgtcggcctggaaaaagcccagcgcattcccgacctcgatgtgtccatcggcagccagtacgacgctagcgtgcgcgagcgcgtgaacctggtgggcgtatcgatgccgatcccgctgttcaaccgcaatcagggcaacgtgctcgccgccacccgccgtgccgatcaggcccgcgacctgcgcaacgccaccgaactgcgcctgcgcaccgaaacccgccaggcgctggacctgtggcaaaccgccaataccgaagtgcgcgcattcaaccagcagatcctgcccgccgcgcaaagtgcagtggacagcgccacccgtggtttcgagatgggcaagttcagctacctcgacgtgctcgatgcgcagcgcaccctgatcgctgcgcgcaaccagtacctcaccgccaccgcccaggccactgacgcctgggtgcgtatcgaacggatctacggcgacctcgcccggttttgattgtctttggagtcctttatgaacaaccgacacggtgtggcacttgccgttgccctgggcctgatgctgtccggcgttgcctgggccgatgaagaagaaggcgcacttgaactcaccgaacagcagatccaggctgccggcattcaactggccctggccgaaccccgcagcctcagcacgatgctggttctgccgggcgaagtgcgtttcgacgaagaccgcacctcccacatcattccgcgtgtggcgggtgtggtggaggcggtcaaggccaacctcggccagtcggtgaagaagggcgagttgttggcggtgattgccagccagcagatctccgaccagcgcagtgagttggccgccagcgagcgccgggttgagctggcgcgcaccacctttcagcgtgaacggcagttgtggcaggacaagatctccgccgagcaggattatttgctggcgcgccaggctttgcaggaagccgagattgccctcaacaacgctcgccaaaagatgagcgcgttgagcggcagcgcggtgctggtcggcggtaatcgctacgaactgcgcgccccgttcgccggcgtggtggtggaaaaacacctgggcgtcggtgaagtcgtcagcgagaccagcaacgctttcaccctctccgatttgtcccaagtgtgggtgaccttcggtgtgtttcccaaggacttgaacaaggtccgggtcggcaaaccggtcaccgtcagctccagcgaaatgggcaccgaagtgcagggcactgtggcgtatgtcggcaacctgctcggtgaacagacgcgcacggccaccgtgcgcatcagtgtgcccaaccccgacgacgcctggcgccctgggctgtttgtcagcgtgcaattggcgacggattcctaccaggccaaggtcaccgtcccacaggccgcgatccagaccgtcgaggacaaaccctcggtgttcgtccgcaccgcagagggttttatcacccgccacctggagctcggcgccagcgaaaacggctacgtcgaagtgcgccagggcctcgacgccggggcgcaggtggccacggtcggtagcttcatcctcaagtccgaactgggcaaaggctcggccgagcacgcccattgatcctgcgagtgattccccatgtttgagcgccttatccaatttgccatcgagcagcgcatcatcgtgctgctggcggtgctgttgatggccggtgtcggcatcgccagctaccagaaattgcccatcgacgcggtgcccgacatcaccaacgtgcaggtgcagatcaactcggcggctgccgggtactcgccgctggaaaccgaacagcgcatcacttttcccatcgaaactgccatggccggtttgcctggcttgcagcagacccgctcattgtcgcgttccggtttgtcccaggtgacggtgatcttcaaggacggcaccgacctgttcttcgcccgccaactggtcaacgaacgcctgcaagtggctcgcgaacaattaccttctggcatcgaaactgtcatggggcctatctccaccggcctcggggaaattttcctatggaccgtcgagtccgaggacggcgcccgcaaagaggacggcacgccgtacacgcccaccgacctgcgggttatccaggactggatcatcaagccacaactgcgcaacgtgccgggcgtggccgagatcaacaccattggtggcttcgccaaggagtaccagattgcccctgaccccaagcgcctggccgcctataacctgaccctgaatgacctggtcacggcgctggagcgcaataacgctaacgtcggcgccggctacatcgagcgcagcggcgagcaactgctgatccgggcgccggggcagttggcatctatcgatgatatcgccaacattgtcatcaccagctcggacggcacgccgattcgcgtgcgcaatgtggcccaggtcgagatcggccgcgaactgcgcaccggcgccgccaccgaaaacggccgtgaagtggtactgggcacggtgttcatgttgatcggcgaaaacagccgcagcgtgtcccaggccgtggcgaaaaaactcgaagagatcaaccgctcgctgcctaagggcgtagtggcggtcacggtctacgaccgcaccaacctggtcgaaaaagccatcgccaccgtgaagaagaatctcttcgaaggtgcgctgctggtggtggcggtgctgttcctgttcctcggcaatatccgcgctgcgctgatcaccgcgatggtgattcccctggcgatgctgttcacttttaccgggatgttcaccaacaaggtcagcgccaacttgatgagcctcggcgcgctggacttcggcattatcgtcgacggcgcggtggtgatcgtcgagaacgccatccgccgcctggcccacgcgcaacagcggcatggtcgcctgctgacccgcagcgaacgcctgcatgaagtattcgcggcggcgaaggaagcgcggcgggcgctgatcttcggacagctgatcattatggtggtgtacctgccgatcttcgccctcaccggggtggccgggaagatgttccacccgatggcatttaccgtggtgatcgccctgctgggcgcgatgatcctatcggtgaccttcgtgccggcggcgattgcgttgttcgtcaccggcaaggtcaaggaagaagaaaatatcgtcatgcgcagtgcacgccgagtctatgcaccggtgctggactgggtgatggcgcaccgatcgctggtgttcagcctggccgtactgaccatcgtcgcctccggcgttgtcgccagccgcatgggcagcgagttcatccccagcctcagtgaaggcgacttcgcccaacaggccttgcgcgtgcccggcaccagcctgacgcaatcggtgcagatgcagcagcagttggaaaaaaccttgatggcccaggtgccggaaatcgagcgcgtattcgcgcgtaccggtacggcggaaattgcttcggatccgatgccaccgaacatttctgacagctacgtgatgcttaaacccaaggaccaatggccggatcccaagaagtcccgggaaaccctgatcgccgatatccaacgtgccagtgcgattgtgccgggcagtgcgtacgagttgtcgcagccgatccaactgcgcttcaacgaactgatttccggcgtgcgcagtgatgtggcggtgaaggtgttcggcgatgacatggacgtactcaacgccaccgccggagaaatcgccgaggccctgaagaaacttgatggtgcttcggaagtgaaggttgagcagacctccggcctgccggtgctgaccatcaatatcgaccgcgacaaggctgcgcgctttggcctgaatgtgggcgatgtgcaggacaccattgccgtcgccgtgggtgggcgccaggccggtacgttgtacgaaggcgaccggcgttttgacatggtcgtgcgtttgtccgacgcgctgcgcactgatatcgacgggctgtcacgcctgttgattccggtgcccggtaatgcgtctggccagttgggttttatcgccttgtcccaggtcgccagcctggacctggtgctcggcccgaaccagatcagtcgcgagaatggcaagcgcctggtgatcgtcagcgccaacgtgcgggggcgggatatcggctcgtttgtcgaggaggccgaggccgcgctgatcgcccaggtgaaagtgccggcgggctactggaccacctggggcggccagttcgaacagctgaaggaagcctccgagcgcctgcgcatcgtggtgccggtggcgttgctgctggtgttcggcctgttgttcatgatgttcaacaatctgaaggacggcctgctggtgttcaccgggattccgttcgccttgaccggtgggatcatggcgctgtggctgcgggatattccgctgtcgatctcggcgggcgtgggctttatcgccttgtccggcgtggcggtgctgaacggcctggtgatgatcgcctttatccgcaacctgcgtgaggaagggcgctcattgtcgatggcgatcaacgaaggcgcgctaacccgactgcgcccggtgttgatgacggcgttggtggcgtccctcgggtttatccccatggcgcttgccaccggcaccggcgccgaagtgcagcggcccttggcgacggtggtgatcggcgggatcatttcctcaacattgctgaccctgctggtgctgccggccctgtatcagtgggcgcatcgcaaggaagaggaaacaccaggctgaaccgtgtgaaccggcccggctggctgctgacctcggcgtgcccctgatgcaggtgcatgatcgactgcacaatcgccaggccgaggccggtgccgccttcggcgcgggtacggctgctgtcggcgcggtagaaacgttcgaacaggtggggcaagtgatgggcctcgataccgcgccctgggttgccgaccgacagcgacacgttctggtcgtagctttctaccagcagcaacacgctggagtcgcagggggtgtggcgaatggcattggacagcaggtttgaaatggcgcgctggatcatcaagcggtccccggtcacccaggcatcaccgcgcaggctcagggtcacgtgcttgtcttcggcgctgagggcgaacagttccatcacccgttgcgcttcctcggccaacgacaccggggcaaattcggcccgtgccgccgggtgactgacctgggccaggaacaacatgtcggacacgatccgcgacagacgctccatttcttcggtgcaggattccaggctggccttgtactccgccgagggccgctcgcgggacagggtcacctgggccttgcccatcaggttggtcagcggggcgcgcagttcgtgggccagatcgtcggagaactgcgacagctgctgcaccccggcgtccaggcgatgcagcatgaaattgatgccctgggccagttcgccgagttccttgggcaggttgtccagggccaggcgatgggtcaggtcctgggtgctgaccttggccgccacccggctgaactgctgcaagggcgccagcccgcgttgcaccagccaccaggcgcccatgccgatcaggatcagcagcatcggcagggcgatcaccgtggagcgcaggtaggcactgagcagcgcttcatcgtcggaacggtccagcgacagcagcacgcgcacgtattcgcccccttgcaggggcatcaggcgcgtagcgctgagaatacgattgccctggccatcgacccagttcagataggccaggtttttgccggtgggcacatcgagtaacagcggttgctggggcttggcgccgacgctgaggagtaccggtgcatcgggccgtgcgccgatgatggtcaggtagatgttgtcgtggcccatcaccaggtccagcagtgaatgggggcggttggtgatgcggtgttcatcgaggccctggccgagggtatgggccagttgctccattttgttttccaggcccttgcgtgcgagcttgtccaactcgtgggtcagggccaggtacgccagggttgccagcagcacaaccaacccggcgcccatcaggctgacggtcaaccccaggcgcattgacaggctgctggtcttcatggccgcgcctccagcacataacccacgccgcgaatggtgtggatcaacttcacctcgctctggtcatcgaccttggcccgcaggcggctgatggagacctccaccacattggtgtcgcagtcgaagttcatgtcccacaccagcgagatgatctgcgtgcgggtcatcacctcgccgttctggcgcatcagcacgtgcaacagggcgaactccttggtggtcaggtcgatccggcggttgccgcggtaggcgcgatgccggcgcgggtccagttccaggtccgagacgcgcagcacgtccggcaccgggatgtgctcgctgcgccgcagcaaggtgcgcacgcgggcgagcagttcgggaaactcgaagggtttgacgaggtaatcatcggcgcccatgtccagacccttgatcttgtcggccagccggccgcgcgcggtcagcatcatcacgcgctggttgccgtcgcggcgcagttgctccagcacttcccaaccgtcggtgttgggcaggttcacatcaaggatcaccaattcgtagctgtgctgccgggccaggtgcaggccatcgatgccgctggcggcgcagtcgacgacataaccgctttcggtcaggccttgctgcaggtagtcggcggttttttgctcgtcctcaaccacaaggatacgcatggggagttaccttcatagaaaacgaaaaggggcatggcctcatggcgaggcgggggaggctgtaggaaaactctgaaccgtgaagtagctttagggtcaagccatgtcaggcaggtgcgacgattcgtcactgcgcctgcacacaaaaaaaacgccccgagcggggcgcaaaaattcatctctgttccaaaggagctacacaaaagccgcagagatgagatgtgttcggtgtgcagtgtagaaagtgcaacttaacaagagagtgagacgaatattacagttctgacagacttcaacctgtgaagagatgtagcgcatcggcaagtgaatgtaattggcctcccttaaagcactgcaattggatactcgataatcagcctaacttcttccaagtccgactcgaatgcacttgagcgcacggttgcctggcgcagtcgcagtgataagtctttcaagtttccactttgcaccacgtatttggcctcgatatcccgctcccagcggcgttgatcggtcagtggggtgccagctgcatcgcgacgcatgtacaccgcgttggcgttgctgtagtcggcgccggtgcctttgccgtagcgagtcatgaacgacaggccggggatgccgaatgcctgcatgtccaggtcgtagcgcaccatccacgagcgctccttgggtgagttgaagtcgctgtactggatcgagttgttgaggaagatcgagtctgactggcgcaggtagtcgaagtcgtcatcgccgttgttgcgctggtgggaaagggccaggctgtgggcgccgaccttcaccccgagcctggcgctccagatgttgttatcgaattcaccgagttttttccggccttcgtccaccgccttgtaatagttgacgtcgccgaacagcgagacttcttcagccagcggatagctggcggcgctgccgaggtagtactggtcccaggcgtctttcaagcggctgctgtagagactcacgctgaggtgttggttgacggtgtaatcaccgccgaaatagccgatccagggtgagtcgacgggcccggcgtagaaggtcgcgaagcctttgtccatgccactttcgctcggctggctcatgccgctcaagcgcccgccttgcagggtcaggccctcgaggctggtgttttgtgcggtcacgccacgaaagctttccggcaacacgcgtgaatcgccgtaggccacgaccggcgtcagcgggaatacgtcgccggccttgatgacggtatccagcacgcgcagtttcgcggcaccgccgactttactgtaggtgtcctcggggtgattttcgctgtctaccggcagcacgccgaacgaacctttgccgccgctgcggccggtgcccgagtccagctttatgccgaccatggcgaacgcatccacgccaaagcccacggtgccctgggtaaagcctgattcgaagcggccgatcaagccctgcgcccaggcctctgaatagccattgccggtggggctggactggcctttgcgatcatcgcggttgaagtagaaattacgcgccagcacattgaagcggctgccttcgataaagccctcgggcgggtcctccacggccacggcagccagcgggaaagcggcgcacagtgaaaggggaaggctgtaatgacggatacgcatggttcgctcctgggtgttggcagtttcagcttcttatgagagtgggcgttcttattgatttggcccgggctgatagttgcaaaccacagataacgaagaagtggcgcgaagattacaattctggaagctcacacttatctaacaaataagtaatgttctggtgaagatgacgtcagggtcagttggttagtctgggcactgaatttttcagtcgaggaactaatcatgaaactttataaattcgcgctgggtgttttaactgcaatcttgtcgttcggtgcgttggctgaaggtgggggggatcgtacgttcgcactgatgatggagcgtaatgaaaaagccatggccgactacgccgccaaaaagggcaagccggcgcccgaggtgcaggcctatcgctatggcatgaagctggacattgccaaggtggttaatgtcacgccgccgatccgctcgtgcaacccggtgccgtcgcgcatgacctatgaagactccagcggcaagctcaatacccttgagtatcaagtgatgggtgtgtgccgaaataacggtggctgatggatccaaaaaaatagtttggccagggcctgaagcccgcttaagaaaatgccggcagcgccgatgcaggtcagattcctctccctcatttgaccatcggtgccccatgttcaacacccgtttgaagcaggagctgtcggctcttcgcgaagaattatccagcttgaatcaggtcaaggagagcctggaaagtgaaatgctgtgcctgacgctggacgccgaaggccgggtggagtgggccaacgccaacttcctgcaggaattggcctaccagaatggccaactgctggggcgcgcgatcgaagacctggagccggcccacgtgcgcagggatgagttccagcaacgcttcaagaatgccctggtgcgcggtgaacatttcgccggcaccgtgcgcctgatgcggggcaatggccaggaagcctggctgcgctcgattgtgcagccggtgcgcagctccgatgggcgcatcaagcatttttcaatctattccagcgacctcacccgcaccatcgaggcctcccgcgagcatgaaaacctcatgaacgcgctggtgcgctctaccgccgtgatcgagttcgacctcggcgggcacgtgctgaccgccaatgaccgtttcctcgggggcatgggttacagcctggcgcagatccagggcaagcatcaccggatattctgcgagccggaggaatacaacagcaccgagtaccaggacttctggaagcgcttgaacgccggtgagttcgttgcggcccgcttcaaacgggtcgacagccatggtcgtgtggtgtggctggaagcgacctataacccggtgctggacgccaatgaccggttgtacaaagtagtcaagttcgccacggtcatcaccgatcaggtcaaccaggagcaggcggtcgcggaagcggcgaacattgcctacagcacctcgctgcaaaccgacaacagcgcccagcgcggcaccacagtggtgacccaggcggtggatgtgatgcgcgacctggccaagcacatgcagcaagccggtgacggcatcgaggcgctgaacgcccagtcccaggtgatcggtaccatcgtcaagaccatcagcgggattgccgaacagaccaacctgctggcgctcaacgccgccatcgaagccgcgcgtgccggtgaacagggccgtggttttgcggtggtcgccgatgaagtacggcagttggcctcgcgcactagcaaggccaccgaggagattgtcggcgtggtgcgtcagaaccaggacatggcccgcgatgcggttgccctgatgaccgacggtcgtttgcaggccgaacaaggcctggcgctggctgccgaagcgggcacggtgatcgtggaaatccaggacggtgcgcagaaggtggtcagcgcggtggggcagttcgccaaccaactgtcgagttgagcgtagggcttcaggtatcgtaggggctttctggtatgaagagtcgactgtccatgagccctacccaccgtcgccccgtccctctgtccaaggcctaccgcttgctcaaccatggccctacggtgctggtgagcgctgcccacaacggccagcgcaatatcatggcagcggcctgggccatgccgctggatttcgaaccgccgaaagtggcggtggtgctggacaaggccacctggacccgccaactgctggaaggcgccggcacgtttgtgctgcaggtgccttgcgtggcgcaggccgatctggtgcaaaccgtcggtaacgtcaccggtgccgacaccgacaagtttgccgcttacggcctgcaaacattcaatggcgaatacactcaggctccgctgctggaaggctgtgtggcctggctggaatgtcgtctgttgcccgagccgcataatcagcagacctacgacctgttcctcggcgaagtggtcgcggcctatgccgacgagcgtgtattcagcgacggccgctggcacttcgaagggcatgatcaactgcgcaccttgcaccatgtggcgggcgggcattttctcagcatcggccagccgattgatgggcacgcgctctaagccttgtcagcgcccgagcatcttcacccagcgcgacggcggcatgccgtaggtgctgcgaaattgccgggtcatgtggctctggtcggtgaagccggccatcattgccgcgtccaccagcgattggccctgggccagcaggctgcgcaccaggtccaggcggcgcatggtcaggtagcgataggggctggtgccgaacagcaggcgaaaatcccgcgacaaggcccagcgatcgcgaccggcgtggtcggccatttcatccagggtgatgctgcggcccagggcactgtggataaattcgcgggcgcgctcggcggccacgtagtcgaaggtcttgcggctgatgatcccgcccgagacgttgttcagcgcgtgggccaggtcgaacagggcgtcctgttcctgcaatgggtcgatggggttgtcgaggttctgcagcaacacctcactggcgcggaacagcctgggatcggtggacaggccgcccgcgataaacggcaacggcttgccgccgaggatctgctggatcagcgagggctcgacgtaaatcatccggtatttgaagccctcttcgctgccggcgtggccgtcgtgggtttcatcggggtgaagcaccatggtggtgccgggcacactgtggatcatgtcgccgcgatagtgaaagctctgcacgcctgtcaacgtacgcccgatggcgtaagtgtcgtggcgatgcgggtcgaaggcgaagccggcaaagtatgcctcgatgcgatccaggccactggcatggggcgcgcggtgcagccagtcgagggtggcggtgggtttgcccatggtgaggggtcacaaaaaagagagggaaatacgttaacccagtctgcatcccttgtctgccggggtcttgtacgattgtgcgagtggagtaggcaacgctcgactgtattatttttgtattgttttatgagtaattattatttttttacgataattttttcgctatcttgcctcgacattcctttcgagaggcattttatgaacacccaccgtcttgcccaactcagccagcgtatgtcgacgatcacactcctgttgatcatcaccatgctcgtgctcaatgctgctgtctggctgtttccggtattgagttcctctgctgatggactcgggtttggcttcgctctgagcgatcgtcagattcaagggcgcgtcgagcgggtggccttgttccccttgtggcaggttctgggcgccatcgtactgtccagcgtccccctgatggcactggcgtgtggcttgaatcacctgcgcaagctgtttcagaactatgcgcgcggcgagtatttctccagttcggcagcgttgcatttgggcaaggtcggcaaagcggtggcaatttgggtcttgctggattttttatgtgaaccgctgctgagtgtctgggtgacgatgaacgagccagtcggccagcgaatgatcagcctgagtgtgacggcccccagctttgtggcattgttcctggcagcctgtatcgcggtcattgcgcgtatcctgtggcaggccaatgaagtggattctgaaaaccgcacgtttgtatgagattcaaatgcccatcgtgattgagctggacgttatgcttgcccgacgcaaggtcaaatccaaggacctggcggcggctatcggaattaccgaacagaacctgtcattgcttaaacaaggcaaggtcaagggcgtaaggctggggactctggatgctatctgcgcctacctggattgccaaccgggtgacttgcttgtgcatattcccgcgcctgctgacgaccagtagccgcttatcaacatcgcaagagggaccgtccgatgctgttctccaacctgccgtacgccgcgccgttactgtcattggcgttgctctggaccgttgcggtagtgacgcccggccccaactttttcaacacggcgcaactggccgccagttgttcgcgccgccatggtgtggtggcatcagccggagtggccacgggtacgatcatgtggggcctggcgggtggcctgggcatcaagtcgctgtttacggcggcaccgatgctgtacctggcgttcaagatcatcggcggctgctacctgatctacctcgggttgaaactgttcaagcgctcttcaccgagcatgagccagaacgtgctgccggacgaagcccggcgttcgctgttttccgcgtggcgcctggggttgctgggtaatttgtccaaccccaaggccgccttgtttgttgccaccatcttcgcgtcaaccatgccgccctcgccgtcaccgatgttgctgaccctggcggtgatcaccatggccaccttgtcgttcagttggtattccagcgtcgccctggtgttttccagcgaacgcatggccacgctctacagccgatcgcgcaagtggctcgaccgctttgccggcggttgctacgtgttgttcggtgcacatctggtagcgaatcgctgacggcccgtggtaagaagccttacgttcaacagtgaggtcgggtcatgggcaaggtgcgggtaggtattatttttggtggccgttcggcagagcacgaagtgtcgttgcagtcggcgcgcaatatcgtcgatgcgctcgaccgctcgcgcttcgagccggtgttgatcggtatcgacaaggccggccattggcacctcaacgacacctcgaacttcctgctcaaccaggaaaacccggccttgatcgccctcaaccagtccaaccgtgagctggcggtggtgcccggcaaggccagccagcagctggtggagacttccggcggcggtctgttggaacatgtcgatgtgatcttccccattgtccacggcaccctcggcgaagacggctgcctgcaaggcctgttacgcatggccgacctgccttttgtgggttccgacgtgctcggctcggcggtgtgcatggacaaggacatcagcaagcgcctgctgcgcgatgccgggattgccgtcacgccattcatcacccatacccgcagcaatgcggcgcgtacttcgtttgaggctgcggtgaacaagctcggcctgccgatgttcgtcaaacctgccaaccagggttcctcggtaggcgtgagcaaagtcggcgacgaagccgagtaccaggcggccgttgaactggcgctgggctttgatgaaaaagttctggtcgaatcggcggtaaaaggccgcgaaatcgaatgcgccgtgctgggcaatgaacaccccatcgccagtggttgcggcgagattgtggtgagcagcggtttctattcctacgacagcaagtacatcgacgaccaggccgcccaggtggtggtgccggccgatatcagccatgaagccagcgagcgtattcgtcggttggccatcgaggcctttgaggtgctgggctgttccggcctggcacgggtcgatgtgttcctgaccgacgatggcgaggtgttgatcaacgaaatcaactcactgcccggttttactcgcatcagcatgtaccccaagctgtggcaggcggcgggcatgagctacagcgaactggtgagccggctgatcgagctggcgctggagcggcatgcggggcgcaaggggttgaagatcagtcggtgatgcgagcaatccacgaataaatcagtgtctttacttcctccgggtgatgcgtccttcggcggtaactggcaaaggtgggggaggtgcagtaagtgcacacctcactcacctcgatttgttcacgccggatgccggcagcttgcagcaacatcacgccatacccgctcaagtcaaaccacgcgcttgctgcttgcctggcgtggggcggtgcaatttgcgggggcaataacggtgcgggttgcgctgtgctccacggcgcccgcccggttgaccacaggtgcccctgatcagcctggaactgcgcaacaaacccctcgctcacctcatagcaacacggtttgatcgacggtccgatcgccgcgcgcaactggtcgactgcaattccttcgtcggtaaaacgcttgattgcattggcgatgatcccgctttgcagccccttccatccaccatgcaccgcagcgaccttttcgccgttttgcgcggcaatgagaaggggcaggcagtcagcggtgatcaccgcgatgggctgatgctcacctgtgcacaccccgtccgcctcaacggtattgggtacctggtcggcttgccactcgatcaccgaggcgctgtgcacctgcttgcagataaacacctctgccgggcgcagcggatcgttgatcgaacaaaaaccatgatcgacgccaggaatggcgccgagattatcggcctgatgcacgcgtgttttctccgttgattgaagtgttcagtcgccgaccgcttcgccttcgcgccgcgggtcggcgccgccgctcagcgacaccttgccctgggcatcccgcgtgcgaacgatggcctggatgccgctggtcatatcgatctcgctcagcgcatggcccttgtccttgagggcctgtttcagtgcagggctgaacaggccgctttccagctcggtcgcgccgttacggctgccgaaattcggcaggctgatggccgcttgcgggtcaagtttccagtcgagcatcgccaccagggacttgctcacgtactcgatgatttgcgagccgccgggcgagccgagcgtggccagcagctcgccgctcttgcggtcgaacaccagggtcggcgccatggccgaacgtgggcgcttgccaggctcgacgcggttggccaccggctggccgtccttctcggggataaacgagaagtcggtcatctggttgttgagcaagaaaccctggaccatcagatgggagccaaacgccgcctccaccgtggtggtcatcgacacggcaccaccctggtcatccaccgccaccacttgtgaggtggagatgcgcagcggcgagcgatccggcgcataagccacctggatacccgccggtacgcccggtttggcgatacccatgctgcgctcgccgatcaaggcggcgcgcctggccaggtagtccggtgcgacgaggcccgcgaccggcacggggacgaagtctgcatcagcgacgtagagaccgcgatcagcaaaggccaggcgaccggcttcggccagcaggtgcacggcgtcgggcgttggttcaaggccggcaggcgcggcgctttttaccggtggcatcgctgcgatgtcgtgggcttgcagcgcctgcaaggtgcccaggatctgcgcgatagcgatcccgcccgatgatggcggtggcatgccgcagactttccactgcttgtaatcggtgcacagtggggtgcgctccttggccgtatagcctttgaggtctgcctgggacaggctgcccgcgttgcgatggccttgcaccttgcgtgcgatctcatcggcaatcggcccttggtacagcgcgtccgggccttccttggcgatgcgtttgaacacattggccagcgccgggtttttcaacacggtgccggtggctttcggtgtgccatcggcattcaggaaatacgccgccatatccggtgactgcgggatgttacggtcagccgcgatcaggctgtgcaggcgcggagacatggcaaagccctgctccgccaggcggatcgccggctcgaacagcgtggcccattgcaaccggccggtcttcttgtgcgccatttcgagcgcgcgcagtactccaggcgtaccgactgagcgtccaccaatttgcgcttctggaaacgccatcggcgtgccgtcgcctctgaggaacaaacgctcggtggccccggccggcgcggtttcacggccgtcataggcgtgtacgtttttcccgtcccatagcatgatgaacgcgccgccgccgatgccggaagactgcggttccaccagcgtcaacaccgcctgcatcgcaattgccgcatcgatcgccgtaccacccatgcgcaacatttcgcgcccggcctccgccgccagcgggttggcggccgcggccatatggcgctcggcgtgttgggtggtgaggtcggtgcgatagccggaacccagctccggtgctggtggctgttcgttgatcggggtatgacaggcagccagggtcagggctgcggcaatcatcgacagttgacggcgggaaatcgaaaacacgcgctgaactccgttcattttgagaatgatctgttgtccttggggtagtgcgttttacaggtaaatcgtgccttgcaggtagagcaccgcgtggccggaaatgatcacgcgatcacccttgagctcgcagcgcagttggccacggcgcttgccgccctgttcggcggtcaaccggttcttgcccaggcgctcagcccagaatggcgccaatgaagtgtgggccgaaccggtcaccgggtcctcattcacgcccacattcggcccgaaccagcgggagacaaaatcaaaccgtgcgctcttggctgtcacggcgatgccgcgtttgggcaggcccttgaggcgggcgaaatccggggtcagtgcggcgacttgcgcttcgtcttccagcagtacgatgtagtcatcggtgctgaacatgtcggcctgttcaatgccgagcgcgctcaacatgccagcgggcgattcacagggttgtggttgcttggcggggaagtccatcgccagttcatcaccattgcgcgtcacccgcagctcgccgctgcgtgtggcgaagcgcaatacctctggcgcgtccgtcagttggtgaatcaacacccacgccgccgcaagcgtggcatggccgcacaggtccacttcgacttcgggggtaaaccagcgcaattcatagagttcaccgcgaggtacaaaataggcggtttcagagaggttgttttcggcggcgatggcttgcagttgctcatcgctcagccactcggtaagcgggcagaccgccgccgggttgccgccgaacggggactggctgaaagcgtcgacttggtagatgtccagtttcaccgtggagcactccgtgcatagaagggaggctggacactaacagtgggtcaagggagcgtcaaaatacagatggcgcctttttttgcgcgcaagtgcaccgctcgtaaccgcaatccatcgtcccggcacttttctccaggcataaaaaacggcctacctttcggtaagccgtttttagtacttggtggctacacagggacttgaaccccggaccccagcattatgaatgctatgctctaaccaactgagctatgtagccaagtggcgcgcattattcgcgtagaacggcaatgcgtcaagtatttattttgagtttttatctacgctttcaactgtttaagcgaaattaccggatcgggcgacgagtggttcgcgattcacccgtctgcacagcaagaaaaacctgatcgcgttgggcagatatccctgccgcccaacgcggggggctgatattaagggaacttcgcgttgtgagtggcgcgtttaagctgttcacgcgcccgggagaggcgcgagcgaaccgtgccgatcggaatgtccagtgcgtcggcggtgtcctggtagctgccgtcggtttccagtgaggcgtatagcgtcttgcgcatctctatcggcaggtggtcgatggcgctcaaggttttctccaggcgccgattgatttcaaattcccagtccaagttatggttctcttcctgtccatgccacagcgattcgtcgaattcgcaatgcacgggcttggcgtacagccgcctgaagtggttgcgtatgaggttttgcgcgataccgcacatccaagtgctgagcgtggcattcccgctgaaacgctcacggttgcgccaggcttccaggtacgtcaattgcagcaggtcgtctgcatcttcggggttgagtacgcgcttgtggatgaatctgcgaagttttttttgctggtcatctgtcaggtgaagcatgaattgaggcgagctgccaaccaggtgcgctaaagcttcaatagggatattcatggatttttccttggagtagacacagtcgaaaggtgtcgacgagaaccccgtttgcactggctgtgccaagcggaaaaattttttaatttattgatttatataaataaaaatcttgtattggtgcgattttgtgcaagtgtttgcagagggcgttgcaggcgcatgcaagttttttcaaatgtgcagtgggccgctagctgatggaaccgcttgggttggtcttgccacacaggtagacactcttcctgttcaggtccggccatgattgaattccattccgaactgccaaaaatccacaatgtggatcaaccagctgtcaatcagacttccacacctgctgccaccacaggcccggttaccgataacctggctctgctgttcaacgaggaagtggtcgccaacagccgggcgctgaatcaacggcagctcatcctgcccttggcatcagttcagatgctcaggcagatttataaccaattgggtcatcccgccaagaagaccttggcaatggccaaattgcagctcaagcagctactgcaagtacgtggtgatgttggggagttgcttggggtttgcggaggcgaccccacgctcacgtgtgttgcgctcaagaatttggaggcccaggggggcactgaagcagacttggcgcgcgatgcacgcatcaagctggaggctagtttcgcaggacagatccaggccggtctgaatactgcggctgcacttgaggaggggtgtcccgacctgcaagaacgcctggcggtgcgaatgctctattaccagagtgtggtttcgcaccaatccctggcgacgatgttgcagacgctgttggatgtatacggtgtggaacggtttccagaaggactcaaggtcatgcaaagagccttggcggacgatatcgccgccaaggtgtcttcatcgcccaatgcgtccctgcgtaccttgctcctgggcctgcaaagctgtgggcaactgagcggggtgttggcggcgtgtcaaggactgctccaacgactggctgtcgatcataaagcggtagtcctgctgcagcgacttctggggttcactggcggtggtgttggcgctgcggaaatcctgagatttgtagatgatttgcagggtggttcaactgcgcagcaattgctggtcctcaatgcacttttgccagtggtcgagcaattgccattggctttatggcccgatagtacagtacgtaatgaaaccctgaattgcttccgggtagtgatcggggagctggaccggattgcacgtagccatgcacgttttccacgtgagctggaggcccgggcgtgacgatgctgtcggtcatcaaccgctttctgctcaaggcggcgcagcgcgccgaagtgctgggcgcagtggtggtgatggccatcgtgttcattttcatcgtgccgctgcccacctggctggtggacattctgattgcgctcaacatctgtatttcgtgcctgttgatcgtgttggcgctttacctgccagggccattggcgttctcatcgttcccctcgattctgttgctgaccaccatgttccgtctggcgttgtcgattgcaaccacacgtctgatcctgctggagcaggacgccggcgatatcgtcgaggcgtttggcaatttcgtggtcggcggcaacctggcggtcgggatggtcatcttcctgatcctgacgctggtcaactttctggtcatcaccaaaggctcggagcgggtggccgaggtggcggcacgtttcagcctggatgccatgcccggcaagcaaatgtccatcgacagcgacttgcgtgccggcctcattgacggcatgcaggcaagggacaagcgagaccagttgtcccgcgagagtcaattgttcggggccatggacggtgcgatgaagttcgtcaagggcgatgctgtcgccggcttgattatcgtcgtggtcaacctgttgggaggcttcgccacgggcatgttccagcatggcttgagtgcttccgactctatcagcctgtactcggtgctgaccatcggcgacggcctgatcgcgcagatcccggcgctgctgatttctctcaccgccggcatgatcatcacccgtgtggcgccggatgggcgcaggggcatcacgaatatgggcgccgaaattgcccggcagatgaccagcgaacccaagagctggatgatcgcttcggtagggatgctggcctttgccgcggtgcctggcatgcctaccgtggtgtttatcctgatagcgctggtcactggtagcctggggtatttcctgatgcgccagcgccaacggcaggaacaacccactgctgaagccgcagaggcggtgcgccccgaagagaacggtcgtgaggacttgcgtgggtttgatccttcaaggccgtacctgctgcagttctctccggtgctgcgtgggacgcccgaggtgaccgatcttattcacgcgattcgccaggcgcgaaatgcgctggtcgccaatattggcctgacattgccaccgttcgaggtggaactcgatgacacgctggccgacgatgaaatgcgtttttgtgtgcacgaagtgccgatggtcaaggcctcggtcgtcagcctggttgcggttgagcgcaaggcgctcacggtcgaacccgcgcacgccataccggggctggcggagcgcgatgaacaggagtggctctggttggcgccggatgatccgctgctcgatgatccgcagttggagcgcttcaccgcggcgagcctgatcgtcgagcgcatgaagcaggcgatgatgcgaagcgggccgcagttcctggggatccaggagagcaagtcgatcctcagttggctggagcacaaccaaccggaattggtccaggaactgcagcggatcatgccgctgtcgcggttttcggcggtgttgcaacgcctggccagcgaaggtgtgccgttgcgggcggtacggctgattgtcgaatcactgatcgagtacggccagcatgagcgtgaaccggacgcactggctgactacgcgcgtattgcgctcaaggcacagatctaccatcagtaccgcgaagccgacggcctgcaggcctggctgctgtcgccgcagaccgaaaacatcttgcgtgatgcattgcgccagacccagaccggcgtgttcttcgccctcgacgaagagcatagcgcggcgttgatcaacctgctcaatcaagccttttgcgcacgcccgaaattcaagagcgtgatgctggttgcgcaagatttgcgcagccctttgcgcacgttgttggtggaagagttcaaccatgtgccggtgctgtctttcgctgagctgggcagtacttccaaggtcaaggtgttgggccgttttgacctgggccaggatgagctgatgcgcggtgcagtggcgtgagggcttgatgatgttcgagttacgcgtgcttgacgggctgcaccagggtgctgcgttgccgttgtttggggagcagtggaccatcggtgcccacagcgatgcagacctggtgctgagtgatcctggcattgccgagcggcatgcatgtctgtggctcatcgacggcgtttggtcggtgcaggccgaagctgggttgttacgcggggctgacggtcaggtgctggctcagatcgcgcgtctggcgctcaatggtgtgttttcggtgggaaacgtacggctgtgtgtcagcctggctgatgagccctggcctcaagcgcctgcgcctgcggcgccgcccgtgttcaatgaggcggcacggacacttaagttgtcgactatctcccactcccagcagaagcgcttgatcagcctggtgctggcgataacggtcatctttatcgtggtgggtatggcgtctacgggcgagcctgaggccaaggcttccttgatgccgcctgtggtgcgcaagcacgagttggcttcaccgttcgaggtgcgtcagcagctgttgaagatgctcaatgagcgcgagttgagccagcgcgtcaacttgcaggtgatcaatgggcaggtcgccctcgatggtgatgtgtcccaggatgatgtagagctggtcgcacgcatgctcaatcgtttcggcgagcaatttgacagcgcggtcccggtgatcagccgtgtgcgcgtgcgcgacgcaaccttgccgttcaagattgtgcagatcgtgggtgggcccaacggtcatgtagtcctggaggagggcggccggctgtttgttggcgatgaagtggagggtttgcgcctggtgctgatcgacaacagcaaagtggtgttcgatggcgtgcagcagtatgaggtgcgctggtgagcgtggaagtgcaggcacgcctcgaggcctggcagcagcgtcaggctcagtcgctggctaccttcgcgcctgtgacgatgcgggggcgcatccagcgcgtcaatggcatgttgttgcagtgccgactgccccaggcgcgtatcggggatctgtgccaggtagagaaaaagccgggcgactacatgctcgccgagatcatcggttttgatcagcaggatgccgtgctcagtgccctgggcaaccttgaaggcgtgcaggtaggcgccggcgtggagcgcctgggtgtttcgcatcgggtccaggtcagcgaggcactcctggggcaggtgctggatggtttcggacgaccgatcaccggtgatggccccagcgcctttgtcgaagccgacttgccggataccagcgcggtattgtgtgaggctcctttacccaccgagcggccacgcatcaaccgtgcattggccaccggggtgcgttcgatcgatggcctgctgacgcttggtgaaggccaacgcgtagggctgttcgctggcgcggggtgcggtaagaccaccctgctggcggagattgcccgtaacgtggagtgcgacgtcatcgtgttcggcctgatcggcgagcggggtcgcgaactgcgcgaatttctcgatcatgaactcgatgagcaactgcgctccaaagcggtattggtgtgtgccacctccgatcgctccagcatggaacgtgcacgtgcggcgttcacggccaccgcattggcagaaggcttccggcgcaaggggcagcgtgtgctgctgctgatcgactccctgacacgtttcgccagggcccagcgtgagatcggcctggctgccggcgaacccctcggccgcggcggcctgccgccatcggtctacagcctgctgccgcggctggtcgagcgtgccggcctgacccgtgagggcgtaatcacggcgatctatacggtgctgatcgagcaggactccatgagcgatccggtagccgatgaagttcgctcgttgctcgacggccatatcgtactgtcccgtaagttggccgaacgtggccattatcctgcggtggatgtgctggcgagcctttcacggatcttgagtaatgttgtcgagcctgcggatatccaggcgggtacagcgctgcgtcgcttgttgtcggcctaccagcagatcgagttgatgctcaagctgggggagtatcagcctgggagcgatgccttgaccgacctggcagtggacagtcgccaggctgtcgatggtttcttgcgccaggacttgcgtgaacccacacccatggcggcaacgcttgctcaactcaaggagctgacggcctatgtcccattctgatgtgctgctcagtgaagtcgagacgctgcgccgcctgcgccgtcaccgggcagaccgcgccgagcgcgccctgcgtgaagccaagcgagcccagcaggccctgcttgcgcatatccagcaggcccaggatgcacttgagcaaacccggcaggaggaggccgtgcaaagtgctcagttgctcagccaacaccaggggcaggtattgactcggcaggctctcaaatcctgggcggcgcaggagcgctcgttatctgccaatacacgtcgagacatagggcagttggaggccttgcagggccagcgtgacgctcagcaaacccgtgtcggcagcgcccagaagcaggtgaccgagtgcctgcggcaggtcgaaaaacttcaggagttgtcccttttattggtacaggagccgacatgacccaggttgcagataaacccgctgagcgtccacgcgtacgtgaacatcgagaggagcgcgagccgggaactcgtggtgttgtgcctgcggaattgacccggttgttcagccagttgtgggccggtgacggcaagggttctggctctggcacttccctgtcgggtgcgaaatcctcgggcagtgccgtgatgatcgaggcgcttgccgaacaactggttccgcgtctccaggccgcttcgcagtggccgcttcaggccgtgttgtacctgccgcgtctggggcggatcaatgccagtgtgcatcgcgaacagaacagctggagtatcgatctggacgcgcaagaggaggcgacggcgcgctggctcagtggcgtgcggcgacagtgtgaggatcggattgcgctgacgctggggcagccggtcagcctgtttctgcctaatgtcggcagcgcatgatagtgccgctgctgacattgccttctatcaagggcgacaccgctgccgcgcgacgccggctgggacgcggtttgggcctggcgtttgaagtggccgggcaagccggtcagttgcggctcgaacctggacgtgcccccgcaggtggccaggcgatgtgcttcgaaacggggtgtggcgtgctggccctcgccgaagcagggccgctgctcagcctgctgggtgaatgcccggtgacgttggccccctccggcaacgatccggattcctggttttgggcgctgttccagtttcacctgagccctcaggtgaaagccctgttgggctatgtgcgattgctggataccgaacggcccaaggcgtttggctgccggctaagtgtggccctggggaaaacccgggtcgaagggtatgtgtggctgaagcccgagagctttctggcgttgtgcgatgccggcccctggcgtgccacggccaggccgatgcccgcgtcgtttcagttggccattgccgtgaccctcggacatttgcagttgccgattgcgcaagcacgcagcctgcggaccggggatgtgctgctgcttgagaggatctttttcctagcccagggcagcggccatttgcaggttggcaaacggcgactgaatggctgcattgatgataacaacgggtcgttgtgcctgaccctgacttcaattgaggagacttctgtggatgaagaattcatagcccccgactatgccggtgatgagggcgacgagccagtgatggacgtattcggtcacgaaccgttcgatgaattgagcatggggctgaacgtacgctgcggcacgttgaacctgaccctgggcgagttgcgtaacctcgcgccgggcgcggtgctgggcattggcggttatgcgccaggcatggcaggcctctattacggcgaccggccgattggccagggacagttggtggaagtcgatggacgcctgggattgcagttatcccgcgtgatgtttggccgatgatacttcaggggttggaccccttagtcctggcggtgtttcttgcggcattatcgttgatgcccatgttgctggtggtgtgtacggcgttcttgaagattgtgattgtgctgatgatcacacgtaacgctatcggtgtgcagcaggtgccaccgagcatggccatcaatggcatcgcgctggccgtcacgctgtttatcatggccccagtcgggtatcagatcgctgaaagcgtcaaagtctccccccttgatctgagcaatgtgcaaacgctcctacagacgggaagcgaagccatcaaaccgttgcgtgccttcatgctgcgcaacatcgacccggatgtgctcacgcatctgctggacaacaccgcacgcctttggccggcgcagatggcccatgaggtgcagcgcgaagacttgatcctgttgattccggcattcgtgctgtcgcaactgcaggcagggttcgagatcggtttcctgatctatatccccttcatcgtgatcgacctgattgtttccaatctgctgttggcgctgggtatgcaaatggtctcgccgatgaccatttccctgccgctcaaattactgttgttcgtgatggtgtctggttggtcgcgtttgctcgacagtctgttcctctcctatctctgagtggcttatggaacccatcgtactgttcaagcaaggcatgttgttggtggttgtgctgtcggcaccgccattgatcgtggcggtagtcgtgggcgtgatgacgtccctggtgcaggcgctgatgcaggtgcaagaccagacgctgcctttcggcatcaagctggtggcggtaggtatcacgttgatcatgaccggccgctggattggcgtggagttgattcaactgatcaacctcacctttgacatgatcggccgatcggccctgaactgaggccctgcctgtgctggtttatctcgagtatctacccagcctggtgattggcatggcgcgtatctacccttgtggaatcctggtggcagccttctgttttcagcatattcggggcatgccacggcataccatcgtgatggtcctggccttgctgcctgcaccgggtattcatgcggcgttggtcggccaggactactcggcgatgctgcttggggtgttggtgctcaaggaggtgggcctggggattttactgggcgtgctgctttcgatgccgttctggatgttcgagtcggtgggggcgctgctggacaaccagcgcggcgccttggcgggtggccagctcaacccttcgttggggccggatgcgacaccgatcgggcatttgttcaagcagctggcaattttcctgctgatggtcagcctggggttggggacgttgacccaagtgatctgggacagttatttgatctggccgcccacagtgtggtttccggtgccggccattaacggcatgagcgtgtttatcgacctgttgggggagacgttcacgcacatgatgctctacgccgcgccgtttattgcagtgttgctgttgctggagttcggcatcgcactgctgggggtctacagccagcagttacaagtgagcacgctggcgccaccagtcaagagcctggcggggatcggcatcctcttgctctacttcacgttgctgcaggacctgattgtcgggcgtatggggctattgggtgaccttaaacaatcgctgaggttgttgatcaaggtcgctatcccatgagtgactccggcgaaaaaaagcacccggcgtcagccaagaagctgcgggatcaacgcaagaaaggccaagtcgcccaaagccaggatgtggcaaagctggtggcgcttacggccatcagcgaaattgccttgttcactgccgagagcagcctgcaacgcttccaacaattgatgctgctgccgatgtcgcgcctgacccagccctttgcgcgagcgttggaggaagtactgtttgaaggcatggtggtgtttttctcattcgccctgttgatggccggggtggcgattgccgccaagctgatcagcagttggatgcagttcgggttgctgtttgcaccggagaccctgaagctggatttcaatcgcctcaacccgatcagccaaatcaagcaaatgttctcggcccagcagttgatgaacttgttgatgagtgtcgcaaaagcctgcctgattgcgttgattctgtatgtggtgatctggccctcattgggtacgttagtcaatttggccaccagtgatctgcagagttatatcctggcgttgatcgctttgtttcgccacttgctgcatgtctgtctcggcatgctgctggtgctggcgctcatcgacctgatcatggcgaagcacttttttgccaaacgcatgcgcatgacccaggtggaggtcgttaaagagtacaaagacatggaaggcgacccccatgtaaagggccagcggcgcgcactggcgcaacaattggcccaggaggagccgaaggtcaagctgcccaagctggaagaggccgatatgctggtggtcaacccgacgcactttgctgtggccttgtactaccgccccggtaaaacgccgctgcccttgctggtcagcaaaggcatggatgccgaagcccgtaaactgatccatcgcgccaaggtcgccgacgtaccggtaatccagtgcgtgtggctggcccgtacgctctacacaaggcagctgggtaccagtatcccccgcgaaaccctgcaggcggttgcagtgatttaccgcaccttgcgcgagctcgatgatgaagccaagcgcgaaaccctggagttgccggaacttgagcaacgttgatcagcggtttctacctgcgtccaaggcttgcagattggccagcgacagcagacggctgaggaccctgtccacagcactgtgggctgcgggcagagcgtgccaaatcaccagagcatcctggtcgtcgacgtagataaaacaaccatcgaacgccagcgcctgctcaaatcgccgttctaacacccgctgcaattgcccggcctgcactgcttcgcgagcgatcttcagtgccagtccctggcggtttccagcccgcagtgcgcaagcgctgataccgggtgccagggacaggtgagcatcggtgccgctcaccaggctgctcagaaatacctggcgttgatcgtcgggcattggctggtgcttcatcgttcaagcgaaatcgtctggtagtccgcgcgctcgccggaggggccgggttcgactcgcattgatgagggccaccagatgaccatcttgtctttggtcgattgtgggcgtgagcacgaatcacctttgcaggtaggagtacatccgctgacgagcaaggctgcactgatcaggatgatacgtaacggtctgtatttcatggcgtggccttttgagcaggtgtgatcaaggagggacggggcacgctgaggtgtgcatccttcactactgggcgcatggcgataaacacctcggtttcctcacctggcttgagccaggcgcgcggccacacggtgactgccagggtctgcgagttactgcactccttttcgtcgatacgtacgttgcgtttgaactggttgcgtaacaccacgaccgctacgttgtattctgggcccgcgtaccactggctacgttcggtattcagcgccaggaggtcacgggtgttgcataaggtgttcagtcccagtggcatcggcgccgcgttgaacgccttgggcacttccccgctgaccagatgcgccagggtagaaatgatgtcactgcgcttgatgaccggctgatggggagccaggcgtttggccaacggagcgagggcggcctgcaattcggcttggtcggcttgtggcaagtagcgcgacgggtcgtcctggtccccgatgacgcgtggggtgaggatgaacaggcgttcacggcgattgctatggcgttctatcgatgaaaacagtgccttgcccaaaagcggaatatctccgagcaacggtatcttgctgtgcttgtcggtgttgtcggtgacatggaaaccgccgacgaccagcgaacgtttttcctccatgactgcctgggtactgaccttgccccggcgcacatcagggtggttgggcgttgggttggtctcgtcgaaactgccatcttcgatgtcgaccgccaaatggatccggtgagcgccccggccggtggtgacccgaggtatgacttgaaggctggtgcccacggtgaccggcaaagtggttgcgaaatctccactggtggtgatgtattgggtgcggttgaagtcgatcaccgccggttggttctccagggtgagcaccgaggggtttgagaccatggttgccagtcccttttcttccagcgcgcgtatgtcggcgtagaagcgatcgcgatgttcaatccacagctgcgacgaagtcccgggtgccatgttgacgccaccccggaagcggctgttctggaaaccccaattcacgccgaattcacgcagttgtgtacgctcgatgtcgagaatgatcgcatcgatttctatcagcttgcgtgcgacatcgagttgagtgatcaactcgcggtacatggcctgacgttcgggcaggtcatagatcagcacggcgttgttgcgcacatcggcttcgacacggattcgtccggcagataccggcgcgcgcggggtcaccgccggccctgcgtccacctgccctgtgttggcgtgtgcaccgagcatttggcccagcagcgggttgcccaaccgtggcacattgggtgtgaggggggccggttgggatgttgggcgttgagacagtcctgtaagcgtcgaggcggagcgcggttccagcaggccacgtaaaatgctggcgacgccgggcacgttgagcttctcgccgcgataatccacctggcggtctgccgcattggcaaacttcaacgggtaactgagcacgctctgtttttcatctgcagagcgacgctggctgctgaattgcttgatctgttctatgtagcgcttggggccggagacgagtaccacaccgtcttccggcaactcgccccagccaaagcggctatcgagcaggccgatatcggtcagggcctgcttgaggtccgctatcgtctctgaagagacctccaggcgcgcggactcctgttggtcaagcgtgctgacgaatagggtgttgttgtagagataccattgaaaacgatgctcgacgcccagtctgtccagcagagactggggggtattcgcgcggatcttaccgttgacgttgccttccagcaggccctcgatttgcagttgggtgccaaaggtctgagcgaagtcttcgagtacttcgcgcagcggtttgtgttcggcctcgtaggcgtacgcggtgtttttccattcgggggggatggcggccaaggtgtttcctgctggaatcagcaaccaggaaagcagcaccagatttcgccaatgaggtcttttgggcgagtcgtcaggcgaagcaaggcgcaaaaaagtgcgcttgtggttcttgttatgcattgtcggctctctggttagtacgacagtgaacgtagtgaggtgggtcttaggttccggggctggtgagcaaagcgtgcacacgcagcgcgccaggtatcgcgttggttgagcagggcttcgaggcaaacgagcacgcacgcctctctttgttcgccttgcaggctttgaatcagccaaagcgcaccgttgtcggcttttcgggcaagtgcgccttggaaatgattcaggctgacgaagcccaggcgcatccaccgctgcaaggctgtgttatctgagcaggtcgacgtcagttgagcggcgagtaataaagacccactctggcgttttaatacgattgggtcatcgccttcatagaaggttgtctgttcatcgcggctgtttaaccagtcactgactatcgcctgcatattattgaaaactctcaaaacaattcttgagcagcaggtgattaactcgattgtgttccagataggacatttgagttgtcattttctttacggccagttcaaagaacagatcggcgtcggcatcgtctgcctgggtggcgagagacgttgatttgaatgtgttgtgcgcgcgcttgctattgttcagaagttgacgtggtagatcgctgaaaaagtccatgggtatttcctttttgtttgccgggatagtgagtgaacactggattttttcccggtgcggagggcaaatggcaaagtcggtagcgttagatgtttatccggtactcgttgctgtgaataaaaaaggtatcgagcattgagcgccaactgatacgaaagtctccttcgtcggttttcaatacgagtgtctgagaaggagtggaaccgtcagcatgaagtttccagaacatcggcttgtgagtggccagacactgttttatttcctcaaaatcattggggtgacataacagggctgcttcgatctctgggacttgattggccatcaattgcttcagcatggctgcaagccttttgggagctaccgtctcgtcgagcacacagcgaattgcctgattggtgatggacgtcgcgtactgttccaggttgtcgagcattgcttggcggtcgcgctcccagcgcttgaattgcgtgtctgcgcgctgccagatctcaagtgatgaggtttccagaagcgcttcgcattttttttctgcctggcgtatcagttcagcggctttagtatgggcgcggttcaagagctcttctgcttgctcccagttcgcaagttcttcccggggtatcagattgcctcgcaacccgggtgtgtccttgaacaactcaagggtgtatcggcataacatcgctggtctcctcaccattggagtcaggaagcgtggggtcgtccgcccaggttgtaatgcgccagactatggcttgccataacgtgttcagccgactgtttacatgctcgaatgaggtgttattttcctctaccctctgcacgcgctcacgggaaaaacgcaatctaagacgctgccaggtagtgggttccacccagctatggagcagttgcagcgggtccaggctcggcaacaacaggtctggcgggagagccttggatagacgcatgcaccacaggtgatggctatcgctcaacggcattgccggctcagtgcagaaggttcgctgaaccagcgtgagtgccaggctcagttgttcctcggaggccagggccaggtgcaataccgtggaggggggcgtgggaggcaggcaggctgtcactcccatgaagtcgcgtggcgtccatcgcctgcttcgataaagcgcgtcaaccgccctgtactcatcacccttccagtcgtcgtgcgcgtgcctccaagggaatgcccaccatttagcccaagccaggtgttcagcgatggaggggtacggactaggcatcatgagccggaccgactgattcacctgctacgggcgagccttgtaggagctttttacgtcgattgtgcaggaccagtgcggcgactaccgctgccaccataccgagcagtgacgcgataacgctgcttcgccaaaaggcgagattctcgctgggcaccaggaacggaccgaagtacaccaggcgttgctgttcctgataggtagtggcaggtacgaagatcacggtaagtttttgcaggttgtccactgcagtggtcatgcctgggatgctgcttgccaccattctgcgaacgcgcgcgcggatgttatcggggtctaggcgcggatcgtgcttgatgaataccgaagcggatgccggttggacaggttctcctggagcgatgcgttcgggcaatactacgtgcacacgtgcaacgataaccccgtcaattttggataaggtcgcttcaagctcctgagataaggcatagatatagcgtgctcgctcttccagaggtgtggaaataaccccttccttgcgaaatgtatcgcctagcgaagttcgagccaccctgggtaaaccagcggcttccagcgtgcgtactgcacgtccgatgtcggttgcttctaccgctacgacgacaccatcttttgccgggattttttgggcgcgaatatgtttgtctgccaattcagcgaccacctcattggcttcttgctcagagagttggcgatgaagttctacgcggtcaccgcaaccgcttaacagaaagatagccgtgagaaatagagcggccggtagaatgttattcatgatgactattgcaagttacagattttgtcgatgcattgagttgccttgccaaggctttttaccatcagttgtgaggtgataacggcacctgataattcgcgtgggtattcgttgaatgcagtcatgtctgtgctgttacttgatgatttcagcgctcgcgccatgcgattttctttggctttaagcagttccgatagctctgccagtatggtaagtgtggtacctgaatctgtaggagcgcgcgccgacgttgaaggagcgagcatagcgctgaaaaaagtggcgtctgtgttgaaggccgaatgttctcgcgtgtcacgggagtcttcggagcggtggtgttgcgttaagagtgcatattcttctatctgcatgtgaggccttcaaggtgggagagctaaagcagatgctgaatgtttgtggatgccatgattgttgtaatttatatagcggcctccccggcagtcgagccggggaggttattgcgttatcgcacttctttacctgcggagtacgcgtttgtaatggtcttcgcttgcaggctctgctgaaaacctttctcggcgactgcggctgctcgcgcgatctggtcatcgctgcctggggatacttcattgcccgataacatatctttgagctgttgaaatattgcgttgttgttgctaccagatatactagaaatactcataataaactccaagttcatctatagggtttgatttactcgcctcggatcaagacacacagcgggtctgcaaggctgataaacttaatccaagctatgactgtgtggcgagcgtgtatgaaacgttccggatattttcgagagcatatgtttctatatgttttccaatgaataggtttttgccagtgatatgtccagttgtttcattcggtagtacagcgtgcgctttgcaaggcctagttctacggccgcggtgtctacacaatggcggtggcgatgcagcgactcctctatcaaagctttttcaatttgttgcaggcgaactttaaggcttacttgggtttctcgctggctgtctccggggggggagagcggtgacaagcccagcacaaagcgttttgctgtcgaccggagctcacgaatattcccgcgccacgagtgactgagcagttgttgcagtaacccgcctgaagggggcggggctgtgcatttgaagtggtcggcttcctgctggaccatttccaggaacaacggaatgatgtgctcacgtcgatcgcgtaatggcggcagctggatgttcacgacattcaggcggaaataaagatcacgtctaaaggtgccccgttcgaccatctggtggagagaagcttgggcagacgcgatgacacgcatgtccacagggatgaaacgggttgagcccaggcgctctactccacgcgactccagaacgcgcagcagtttggcttgcaggcccaatggcatgctatcgatctcatcaaggtagagcgtgcccaggtgggctgcctcaatgaagcctgccctggattgcatcgctccggtataggcaccactgttgacgccgaacaattggctttccgcaaggctttccgggatggccgcacagttcacggcaacaaagttgcctcggcgtcccgataagcgatgaattcgctctgccaaggtatccttgccggtaccggtttctcccagtaacagcaggtcaatattgagggtcgccgtgctgttaagtgtctgttcaatgtccgggccttcgatgagtgacgttgccgtttcattttctttgttgaaggcagccgacattgaatgatgctccgtgctcgctattaagccattgtcaaaaatacggtatgtagatgctgactagtaacgcctagggtatagaagttttcatcctttcttaaggtgggaagggggaaagtcttgtggggaagtgtctctttgttgtggcgataaagtaactattttgaacttgagctcgaggggggtaggagaagtctgaaattatttaatattttgatgtgagtagtcacttgttgagcattaaacagtcacgcataaaaaaagccgatgcagagcatcagcttttttatctgtagcttaaatggcgagtgatgattacacgttaaaccggaaatgcatcacatcgccatcttttacaatgtattccttaccttccaaacgccacttgcccgcttccttggcaccggcctcacccttgaactggatgaagtcgttgtaggcaatcacttcggcgcggataaaccctttttcgaagtccgtgtggatcaccccagcagcctgtggtgcggtagcaccgaccttgacggtccacgcacggacttcttcgacaccggcggtgaagtaggtctgcaggttgagcatttcataaccggcgcggatcacacggttcaggccaggttcttccaggcccagggcctcgaggaacatgtctttttcttcaccgtcatccagctcggcgatttccgcttcgatcttgttgcacaccggcaccacgatggcgccttcttcgtcggcgatggccttgaccacgtccagcagtgggttgttctcgaaaccgtcttcagcgacgttggcgatgtacatcaccggcttggtggtcagcaggtggaaacccttgatcacggccttctcatcggcgcccatgttcttcatcaggctgcgtgccggcttgccttcggtgaagtgagcaatcaactgctccagcaggcctttctggacgactgcgtccttgtcgccgcccttggcgttacgtgcgactttctgcagttgcttctcgcagctgtcgaggtcggcgaagatcagttccaggtcgatgatctcgatgtcgcgtttcgggtcgacgctgttggatacgtggattacgttctcgtcttcaaagcagcggaccacgtgagcgatggcatcggtctcacggatgttggccaggaacttgttgcccaggccttcacccttcgacgcaccggcgaccaggccggcgatgtcgacgaactccatggtggtcggcaggatgcgcttgggattgacgatggccgccagggcgtccaagcgtggatccggcatcggcacgataccgctgttgggctcgatggtgcagaaggggaagttctccgccgcaataccggatttggtcagggcgttgaacagggtggatttgccgacgttgggcaggccgacgatgccgcaattgaatcccatggtgtttcccctcggtaagagtcaggccttctggctgtgcaggtttttcatcgcgcggttccattcaccggcgaagatatccggcagcacgccgagggcaaagtcgatgctggcatcgagtttttcctgttcggcgcgtggcgcacgacccaggacgaaatttgaaaccatactggcaacgcctgggtggccaatgccgagccgcagacggtagaaattattctgattacccaactgcgcgatgatgtcgcgcaggccgttgtgcccgccatgcccgccgcccagcttgagcttggcaacaccgggtggcaggtccagttcgtcatgggccaccaggatttcctcgggtttgatccggaagaaacccgcaagcgccgcgacagcctggccgctgcggttcatgtaggtggtgggaatcagcagacgaacatcctgaccctggtgcgaaaagcgcccggtcaggccgaaatgtttgcgatcggccaccaggttcacaccttgggcgtgggcgatgcgctcaacaaaaagggcccccgcgttatgccgggtctgttcgtattcggcgcctggatttcccaggccaacgatcagtttaatggcagtcacgacaggggcccttcctttggagttgtggataacatcgccagacctgagtgcggcgaaagtggacgacactacatcatttactcaagagtaaacgccgcgttatcgcccgctttctcgctacgtttcggtccgcgatgtttcctcaagctccggcaatgcagagtgaattactctgcagcgccttcttcagcttctggagcaacgcgtggagcgtgaacgttggcaactgctttgtcatcaccgtgagccagtgcgacaaactcaacgcctttaggggccttgaggtcggacaggtgaacgatagcgccgatttccagagccgacaggtcgacttcgatgaactcaggcaggtctttcggcaggcaggtcacttcgatttcgttcagtacgtgcgagatctcgccgcctttcttgaccggagcgtcttcaccaacaaagtgcacaggcacgatagcggtcagtttctggccagctacaacgcgaacgaagtcggcgtgcatgatgaactgcttggacgggtgacgctgcatcgctttaacgatgacgttctgcttggcgccgtcgacgttcagctcgataacgtggctgtaggcagcttcgttttcgaacagcttggcgatttccttggccaggatggtcacggattcagcaggcttgttaccaccgtatacaacggctgggatgttggcggcgtgacgcaggcggcggctcgcacctttccccaggtcagtacgcgcttgggcgttcagagtaaagtcagtcattttgtatctccaaaatagccatcatcgagcggcgtttgcgaccagcgccggcctcgacatgggcaaaaaagccccgccccaacagaatgtcggggcggggcgcttttcgtcagtggaatgtaccgaaggtttgacccttagcggaacatcgcgctgatcgattcttcattgctgatacggcgaaccgcctcggcaactaccggtgcgatatccagttgacggatacgcgaacaggcttgagcagcagcggacaacgggatggtgttggtcaccaccagttcgtccagcatggaattctcgatgttctcgatcgctcggcccgacagcacagggtgtgtgcagtaggcgaagactttagcggcaccgtgctctttcaaggctttcgccgcgtggcacagggtgccggcggtgtcgaccatgtcatcaaccagaatacaggtacgcccttcgacatcaccgatgatatgcatcacttcagagtgattggctttctcgcggcgtttgtcgatgatcccgaggtccacgcccagggatttggcaacggctcgtgcacgcacgacgccaccaatgtccggggacacgatcatcaggttttcaaagcgctggtcttcgatgtcatccaccaatacgggggagccgtagatgttatctaccggaatatcgaagaacccctggatttggtcagcgtgcaggtcaaccgtgagaacacggtcgatacctaccacggtcagcatgtcagcaacgactttcgcgctgatggccacacgtgcggagcgcggacggcgatcctgacgggcataaccaaagtaagggattacagctgtgattcgagtcgctgaggagcggcggaaggcatcagccatcacgacgagttccatcaggttatcgttggtcggagcgcaggtcggctgaataatgaacacgtctttaccgcggacgttttcattgatctcggctgtaatttcgccgtcggagaatttaccgacagagatgtcaccgagagggatatgcagctgacgtacgacacgtcgagccagatcggggttggcgttccccgtaaagaccatcatcttggacacgcgcagtacctagaggctgagggtaacctggatgagtataggaaaatggcaggggcggctggattcgaaccaacgcatggcaggatcaaaacctgctgccttaccgcttggcgacgcccctgtatctgttgcaacgagtgcctaacactcggttcctttagagcagactttgcaacttgcgatgcaacatcgaaacgttgcttccctttgctacaaaccctgtaagggtctctgtaagaagggccgagactttatcagcttcagctttgcttgggaagcccccaaacacacaacttccagttccggttaattttgcttcggtaaatttacctaacaaattcaaagcgttacgtacctctggataacgccttgctacaaccggtaagcagtcatttcgactgtttcccttgggaacggggcgcactttaatgggagaagagttacgtgtcaacaacggatctgaaaaaatttctgctgtacttacagatacttgcggcacaagcacgacataccacggctcttcggggtattccggggtgagtttctcccccacgccctcggcgaaagccgcgtgcccacgcacgaaaaccgggacgtcggcgcccagtgtcaggcccagtgtggccagccgatcatggtcccaacccagttgccacaagtgattcaggcccagcagagttgtcgcggcattcgagctgccgccgccgatgccaccgcccatgggcaggattttatcgatccagatatcgatgccgagcgcgcaaccggattgctcctgaagtttttttgcggccttcacgatcaggttactgtcgtgaggcacgccttcgaattcggtatgcagcttgatcacgccatcgtcgcgtacagcgaaggtcagctcgtcgccgtagtcgaggaattgaaacagcgtctgcagttcgtgatagccgtcttcacggcgaccgagaatgtgcagcatcaggttgagcttggccggggagggcagggtcaatgtttgtacggacacgttattgccccagcttgcgtggttgccagtccttgatcaccagtgtgacgtcaaggtcgggaccatgcagcttgatgcgctctggcaaccaatagccgctttgctctacgtagctcaaatactcgacctgccaaccatcctgctccaggctggccaggcggctgtcgccgttgaggctcaggcgactcttgctgtcaggtgcgggcaaaccgcgtacccaccacaccaggtgagacaccggcagcttccagccgatctgttgttccagcaattcttccggagaagccgcttcgtagcggccctggttggccacttcaaggctgacttgccccggccggccggtcaggcgtgcggcgccacggcccagcgggccagacaggcgaatatcgtagtagtcctggcgttgcagccagaacaaggtgccgctgccggagtctttcggcgcgcgaacccccactttgccttcgatctgccagccatcgatgctgctgagctggtccttgtgctgcttccattgcgccgggttgccctggccttcaacggattcacggctgccgatgcccgcgcaaccggcgagcagggctatgaggctgaaaataacaacgtggcgcaagaacataagcttaaagagtctcggatccggtcaggcgcttgatggtgccgcgcaggatagggctttcgggttgttccttgaggaatttttcccagatctggcgtgcttcgcgctgtttgccattggcccacagcacttcgcccaagtgggcggcgacttcctggtcggggaagcgctccagcgcctggcgcagcaagcgttcggcctcatccaggttgcccaggcggtaattcacccagcccaggctgtcgagcacggccgggtcctccgggttgagcttgtgggcttgctcgatcagcaccttggcttcgtcgtagcgcgtggtgcggtcggacaaggtgtagcccagggcgtttagggccatggcgttgtccggatcgcgcttgatgatcaggcgcaggtctttttccatctgcgccaggtcattgcgtttttccgcctgcatggcgcgggtgtacagcaggttcaaatcatccgggaattgcagcaaggcttgttgcagcagcttccaggcgcgctcgccctggttgttggccgacagggtttcggcctggatcaggtagagctggatcgcgtaatccggttcggcatcccgcgcggcggccaggcgtttctccgcctcgtcggtgcggccgttgctcatcaggatgtcggcctggcgcaattgggcgggcaggtagtcgttgccggggccgacctgggcatattcgagcagggcggcttgcggatcgttgcgctcttcggcgatacggccgaggttcaggtgcgccgaatccacatggctttcacgttggatcagctcctccaggtaacccttggcctcgtcccaggccttggcttccaggcacaccagtgccagggaataacgcaattcgtcgtcgtccgggtattgctggaccaggttggcgaactgcactttggcgtcctccatgcggtcctgttccaccagcatgcgtgcgtaagtcaggcgcaggcgcttgtcgtccggatacttcttgaggcttttttccagcagcggaatcgcttccttgccgcgattgaggttctgcagcaggcgtgcgcgcagcaggatcggcgcgatttcgccttcttccggcggattctgctccagcagcttcagggccgcatcggcttcatcatcctgttgcagcagtaacgccttgccaaaaatcaactggctgttcttcgggtgcttttgcagcaggcggtcgaaactcttcatcaggccattgcgcgtgtcctggtcggtgtcggcagccgacagcgcgaggaagtcgaaatgggtgtcgcccttgccctgcaggactttctccatatagaccatggagtcgtcatagcgcccggcgcgtgccaactgaatggctgccgcccgctgtgcttccaggtcgtccggagcgtttttcgcccagatcagcgaggagtccagcgcagcctgatcggcccccaggtactcggcgatgcggaaggcccgctcggaaattcccggatcctgggtgttgatggcctgggtcacgtagttatccagcgcaatatcgaagcgattgcgctggccggccagttccgcggtcagcaggctgtacaccgtttcttcggtgaacgaggaataaaccttgggcttttcaggggcgggagtggtgtcttccaccggcggcgtaccgtccggcgacacgggggccatggcctggcagccgctgagaaagacaaaggcgaggagcaacgcggaagatctattcatataggaagaggacgactaacctgcggtcggatcatcatgacacaagccttcggccaaacataaccgagtctcagttgatgcctttatagacacaaggcattaggacaatagacgacggtggttgttctgaatctttcgaagtaggacaattgtcggcttcccgacatcatcagcgatattgaatggccttcctcgcactcggtattaaccacaagactgcctccgtagacgtgcgcgagcgcgtggcgtttacgcctgagcagttggttgaggccttgcagcagctctgccggctcaccgacagccgcgaagctgcgatcctttcgacctgcaatcgcagcgagctttatatagagcaggagcatctttcagcggatgtcgtactgcgctggctggccgattaccatcatttggacctcgatgaccttcgcgccagcgcttatgtgcacgaagaggatgcggcagttcgtcacatgatgcgtgtggcggccggcctcgattcgctggtgttgggcgagccgcagattctgggccagatgaagtccgcctacgccgtggcgcgtgaagccggcaccgtcggcccgctgctggggcgcctgttccaggccaccttcaattccgccaagcaggtgcgcaccgacaccgccatcggtgaaaacccggtgtccgtggcgtttgccgccgtaagcctggccaaacagattttcagtgacttgcaacgcagccaggcgctgctgatcggcgctggcgagaccatcaccctggttgcccgccatctgcatgacctgggcgtgaagcgtatcgtggtcgccaaccgcacattggagcgcgccagcatcctcgccgagcagttcggcgcccatgcggtgttgctggcggacattccggccgaactggtgcgcagcgatatcgtcatcagctccaccgccagccaactgccgatcctgggcaagggcgcggtcgagagcgcgctgaagctgcgcaagcacaagccgatcttcatggtggatattgccgttccccgggatatcgaacccgaagtcggcgagttggacgacgtttacctctacagcgtcgacgatctgcacgaagtggtcgccgaaaacctcaagagccgccagggcgccgcccaggctgccgaggaaatggtcagcaccggcgccgaagacttcatggtgcgcctgcgtgaactggcggcggtggacgtgctcaaggcgtatcgtcagcaaggcgaacgcatgcgcgacgaggaattgatcaaggcccagcgcttgctggccaacggcagcagcgccgaggaggtgctgatgcaactggcccgtggcctcaccaacaaattgctgcatgcacccagtgtgcaactgaaaaagcttaccgccgaaggccgcctcgatgcgctggccatggcccaggaactctttgccctcggtgagggcgcgtcagatagctcttcggataaaaaaccgcaatgaaagcgtcactgctcaataaactggacgtgctccaggaccgtttcgaagaactgaccgccttgctcggcgatggcgaggtcatctccgatcagaccaaattccgtgcctattccaaggaatacgccgaagttgagcccgttgtggccacttacaagaatctgctgaaggtgcaggccgaccttgaaggtgcccaggcactgctcaaggacagcgacccggacatgcgcgaaatggccgtggaagaagtccgcgaagccaaggaaaaactcgccgagctggaaggcgacctgcaacgcatgctgctgcccaaggacccgaatgacgggcgcaacgtgttcctcgaaatccgtgccggcaccggcggtgacgaggcggcgatcttctccggcgacctgttccgtatgtactcgcggtatgccgaacgtcgcggctggcgcgtagagatcctgtccgagaacgaaggcgaacacggcggatataaagaagttatcgcacgggtcgagggcgacaacgtctacggcaagctcaaattcgagtccggcgcgcaccgcgtgcagcgtgtccccgcgaccgagtcccagggccgtatccacacttcggcgtgcaccgttgccgtgttgccagaaccggacgagcaggaagccatcgagatcaacccggccgacctgcgcatcgacacctaccgctcctcgggcgccggtggtcagcacgtcaacaagaccgactcggcgatccgcatcacgcacttgccgtcgggcatcgtggtggagtgccaggaagagcgctcccagcacaagaaccgggcgcgggctatgtcctggctgtcggccaaactcaatgaccagcagaccagcgccgccgccaacgcgattgccagcgagcgcaagttgctggtgggctcgggcgaccgctccgagcgcatccgtacatacaactttgcccaaggccgggtcaccgaccaccgggtcaacctcaccctttactccctggacgagatccttgccggtggagtggatgcggtgatcgagccgttgctcgccgaataccaggccgatcaactggccgcgataggtgattaaatgaccattatcgccagcctgctgcgcgccgccgacctgcccgactcgcccacggcgcgcctggatgccgaattgttgctggcggctgccctgggtaagtcgcgcagttacctgcatacctggcccgagaaaatcgtcagcagcgagcacgcgctgacctttgccggctacctgcaacgccgtcgcggcggtgagccggtggcctatatcctcggccagcaaggcttctggaagctggacctggaggtcgcgccccacacgctgatcccgcgtccggataccgaattgctggtggaaaccgccctggaattgttgcccgccacgccggccaaggtcctcgacctgggcactggcagcggcgccatcgccctggccctggccagcgaacgcccggcctggcaggtcaccgccgtcgaccgtgtgctggaagccgtggccctggccgagcgcaaccgccagcggttgcacctcaataacgccacggtgctgaacagccattggttcagcgcgctgcacggccatacctatgacctgatcatcagcaacccgccgtacattgccgccaacgatccgcacctggtggcgggcgacgtgcgtttcgagccggccagcgcattggtggccggccatgatggcttggacgacctgcgcctgatcatcaaagaagccccggcccacctgaatgccggtggccggctgttgctggagcacggttacgaccaggccccggccgtgcgcgacctgctgttgagtgaagggtttgaagaggtgcacagccgcatcgacctcggcggccatgagcgcatcaccctggggcgccggccgtgctgaccgatcaggagctgttgcgctatagccggcagattctgttgcagcatgtcgacatcgacggccagttgcgcctgaaaaacggccgtgccttgatcgtcggcctcggtggcctgggcgcgcccgtcgcgttgtacctcgcagctgccggcgtcggcgagttgcatctggcggacttcgacaccgtcgacctgaccaacctgcaacgccagatcatccatgacactgacagcgtcgggcagaccaaggtcgactcggccctgcgtcgcctggcggcgatcaatcccgagattcaactggtcgcccatcgcaccgcgctggatgccgactccctggctgcggcggttgaagcggtcgatgtggtgctcgattgcagcgacaacttctccacccgcgaagccgtcaacgcggcctgcgtcgccgccggcaagcccttggtcagcggcgcggcgatccgtcttgaagggcagctgtcggtgttcgacccgcgtcgcgccgagagcccgtgctaccactgcttgtacgggcacggcagcgataccgaactcacctgcagcgaggctggtgtggtcggcccactggtcggtgtggtcggcagcctgcaagccctggaagccttgaaactgctggccggtttcggtgaaccgttggtaggccgcttgttgctgatagacgccctggccacgcgctttcgcgagttgcgcgtcaagcgtgaccccggttgcagcgtgtgcgggacgccacatggttaagggcgcgccgatcggtgtgttcgattccggtatcggtggcttgaccgtgctggacgaaatccaccagctattgccccaggaatcactgctgtacgtggccgattgcgggcatatcccctacggcgagaaaagcccggcgtttatccttgaacgctcgcggcaggtggcggcatttttccaggcgcagggcgccaaagcctttgtgattgcttgtaataccgccactgttgccgccgtcgctgatctgcgtctggattttcccgattggccgctggtggggatggagcctgctgtcaaaccggcggcggcagccacccgcagtggcgtggtcggggtgcttgccaccaccggcacgctgcaaagcgccaagttcgccgcgctgctcgaccgcttcgctaccgatgtgaaggtcatcacccaaccgtgcccgggcctggtggagctgatcgaaagcggtgacctgaccagcccggccttgcgccagttattgcagggctatatcgacccgctgctcagcgccggttgcgacactgtcatcctcggctgcacccactatcccttcctcaagccgctcctggcgcacatgctgccccccagcatcatcctcatcgacaccggcgctgccgtggcccgccagctcaaacgtttgctgggtgagcgcgacctattggccgtcggcaatccagcaccggcacagttctggaccagcggcgatgtgtgtcacctaagaaatatcctaccgacactatggaaatatccgggcgttgtgagaagcttcggctcgtgaaaatttcgtgaaatacccgcgttattagctggaacttctggctacacgccagcttcctatagcgagatagcctgtagaaaatcatataacttcgttcggaaaggatgtttcttatgaagcgcttgttctgtttggctgcgattgcggccgctgtagtggggcactctgtttcggcgcaggccgctggcctggaactgggggtggggagcaccagcgattcgaccatgacctaccgtttggggctgacatcggactgggacaaaagctggtggcagagcgataccggccggttgaccggctactggagcggcgcctacacctattgggatggggacaagcgggccagcgccagcagtctctcgttctcgccggtgtttgtgtatgaatttgccggggagtcggtgaagccttacatcgaggccgggatcggggtcgcagtgttttcccgcaccaagctggaggacaacaacatcggccaggcctttcagttcgaagaccgcctgggtttcggcctgcgcttcgcgggtgggcatgaggtgggtattcgtgccacgcattattccaatgcgggtatcagcagcaataacgatggggtagagagctactcgttgcattacaccttgccgttgtaactcttcaggacactgaaaaaaatatgtgggaggggcaagccccctcccacagttgattgccacaatcttcagcatcagcggtaggcggtagcgataccctgtcgctcttccaggcactccggcgcgcccatctcgaactcccgacaaatcagtggccgccgctcgtagatcgtgcacatcatcgtgtcccggtccagcgccgcgcaccagccgtcgtccaggcgcagcatcacttcaccgccccactcatcggtatcgatatagcgctccggcacgccggtgtcggtgatcaacatgacttccagctggcagcagcaggccgcacacgtcgagcaggtgacggcgggttcggcgatttgggtgtgggggatgttggtcataggcgtgcagtgtaaggcaagcgggtgacgcacgtgtgaaacggctgacggacgtcagcgcgccagccgatgcaaacccacaaacaccatcgcccacagcagcgccagcgcaaccatcgtgggcgcgaagccgaaaccaaactgcacccctgccagttggctaccggcgtaataagacagcgggccgcccagcgcacccagcacggcggcacgccaccagggacgggcactccaggccaggcaatgacgcaacgtcgtcgccagcaatgcccatagcaggatcaaccagaagggaatcaacgtgcccggttccgtgaactcaaacacccccagcatgcgcaacgcggtgtccaatagggtgcccagaaccatcacgctcaggatcaacctgccgtcttcagcccacgaacttatccacagcaggtgaactgccagcacggcaagccccaccattaaccacgggctgtccccacccagcacacaggcaaaccaaccgcactgaaacagcacggcattggccagcgtcttaagcattgaagcgcccgagcagcggcgggttgatcgccgatggcttggccagcagcaattgcgcggtgccaatggtgcgctccatgaagccgccttcgcagtagcacaggtaaaactcccacaggcgcaggaagtattcgtcgtagcccagctcggcgaggcgaccgtgggcgcgacgaaaattctcatgccacaggcgtagggttcgtgcgtagtgcaggccgaaatcttccatgtgcagcaggttcatgtcggtgttgcggctgacgatgtgcagcatgttctgcacacagggcagggcgccgccggggaagatatagcgctggataaaatccacgctgcgcttggcctgttcaaagcgttgctcacgaatggtgatggcttgcagcaacatcagcccatcgttcttgagcaggtgcgcgcactgtttgaagtaggtcggcaggaagcgatggcccaccgcctcgatcatctcgatggacaccagcttgtcgtattggccggtgaggtcgcggtagtcctgcagcagcagcgtgacctggccttgcaaccccagggcttcgatgcgctgttgggtgtaggcgaactgttccttggagagtgtcgtggtggtgacctggcagccgtaatgctgcgccgcgtacagcgccatgctgccccagccggtgccgatttccagcaggtggtcggtgggcttgagggcaagcttctggcagatgcgctccagcttgttcaactgcgcctgttcgagggtgtcgtcgggcgtcagaaactgcgccgctgagtacatcatggttgggtcgaggaattcttcgaacaggtcgttgcccaggtcgtagtgggcggcgatgttcttctgcgaacccttgcgcgtgttgcggttgagccagtgcaggccctgggtgaacggccgcgccaggcgtgccaggccgccttccattgcatcgagcacgtccaggttgctgaccatcacgcgcaccacggcggtcaggtccgggctggtccagtaaccgtggataaacgcttcgccggcgccgatggacccgctggccgccacgaggccccacacggcagagtccaggatctggatttcccccagcaagtgcgcttcccgtgcgccgaacacttgccgctcgccgtcctcgatcaccaccaactggccatggcgcagttggctgagttggcgcaataccgccttgcgcagcagcgcggcggtcatgccgttgacgttcaggcggtgagtcttgaccgataagctaggggatttcatggcggcgatccttggtgtacccgactgcggtgcgagaggcgccatcggcggcccggtgggaaaaaatcggcgtgcgtttgagcaacaggcgcaaggcctgccagtaaatggcgaggcaggtcttggcggtcatccaggggaaacgccacaggtagcgatgcaggctggcgcgatccagcgtttctttctccaggctcaacgtggcgtcgaagattttctgcgtgccctgccaatcggccatgtgcacgccgagcctggcggcgggagggctgaagctcatgcggtattccaggtcgcggggtagaaacggcgacacatggaaggccttggccacggcgaaatgctggtgctcatcggcgtccagggcctgggccggcagcacgtagtgatagcgttcgcgccatggggtgttggtcacttcacacaggatcgcggccagacgtccgtcggcctcgaagcagtagaagaaactcacggggttaaaagccaggccccaactacgggcctgggtcagtaggcagataacgccctggggtgtatgccccagtgccttgccgacttcctgacgcacggcatcgctcaagctcatgccggtgcgcgtccattcacgcaggtaatcctgctggcgaaaaccgaagggggccaggcgactgcgcccggccaggggcgagagcccaagcacttggtgttcttcgctcaaatccaggtacagcaggccgatgcggtagcgaaacgcatgggctttgggcgcaaaccgccgatgggcgatccagccgctgtacagggcgctgttcacagggtttccccaaaggcttcggccacgcgcaatgcgctgaccacgccgtcttcgtgaaagccgttggcccagtacgcgccgcagtaaaacgtctggcgcacaccggatatttcctcgcgacgcgcttgtgccgccaccgccgccaggctgtattgcgggtgggcgtaggtgtagcgggccagcaccttcagtgggttgatcattggcgtctggttgaggctgacgcaaaacgtggtggcgctgtcgatgccttgcaggatgttcatgtcataggtcaccgccgcctgtgcctggcgatcgccggtcagccggtaattccagctggcccaggcgagtttgcggtcgggcaacaggcgcgtgtcggtgtgtagcaccacgtcattgtcggcgtagggcatggcgccgaggatctcctgttcggcctggctcgggtcggccagcaacgccagggcctggtcgctgtggcaggcgaacaccacgcgatcaaacccttcactgccggccgggctgtggataaccacaccgttgtcggtgcgtgccactttatgcacagggcaattgaggcggatctgttcgcgaaaactgcgggtcaagggttcgatatagttgcttgaaccaccttcgatcacacaccactgcggacggttgttcaccgagagcaacccgtggttcttgaaaaagcgcacaaagaactgcaacgggaaccccagcatatcggccagggacatcgaccagatcgccgcgcccatcggcacgatgtagtgccgcacaaaccgctcgccgtaaccaccggcgctgagatagtcgcccagggtcatctcggcgctgatgcgctgctcctgcaggtccagcggcgcctggcgattgaaccgcaggatatcgcgcaacatgccccagaaccccggcgacaggatgttgcgacgctgggcaaacaggctgttgaggttgttgccgttgtactcgaaccgggtgtgctcgtcgcacaccgaaaagctcatctcggtcggtttgaacgccaccccgatctgccccagcaggcggatgaagttggggtaggtccagtcgttgaacacgatgaaaccggtgtcgaccgcgtagcgtttaccctcgacggtgacgttgaccgtgtgggtatgcccgccgacgcggtcgcccgcttcgaacagggtgatgtcgtgacggcggctgagcagataggcgctggtcagcccggcgatgccgctgccgataatggcgatcttcacaggtcgtcctttttcggcggcgggctgcgcaacatgcgcttgccgatgatcagttgcgcacggttcggcagtttcgacagcggccacaacgtggcgatgaacagtgcgggaaaggcgatttccaacgggcgcttttccagcttggcgaaaatatgccgtgcggctttatccgccgaccaactgaggggcatggggaagtcattgcgttcggtcagcggcgtgtcgacaaagcccgggctgatcacggtgacgtcgatattttccggcgacaggctgatgcgcaaggattcgaacagatagcgcaggccggccttggacgcgccataggcctcggcgcggggcatcggcaggtaggtcacggcgctggcgacacctaccaggtgcggcgtgtgcccggcgcgcagcagcggcagggcggcttcgatgcaataactgctggccagcaggttggtacgcaccacgtgctcaatgatcgatgagtcaaactgccgggcgtccacgtactcacaggtgccggcattgaggatgaccgtgtccagcgcgccccaggccacgccaatgcgctcaccgatctcgcgcacggtctggctgttggtcaggtcgccggccaccaccaacacctggccagggtagcgttgggcgagggcttccagcgggcctttcgaacgtgagctcaaggcgacgtgggcgccgctgttgagcaactccacggccagcgcggcaccgatgccactgctggcgccggtcagccaataacggcgaggcaatgtacggctcatcccattctccttttcagccagcccacgacgttgcccagcacgggcaagtgttcgtagagcatggcgccggcatcgaaataatcgcggtggcggtacaccttgtcgcgccacatcacgtgcgaacaaccttccacccggatcaccttgccgttggccaggcgtgggtggcagaaactcattttccagcgcaggtaaccctcaccttcggccacctgatcgaaaccgtggaagtcgaagcgtagctggctgacgttgctgtacagctcggcgaaatagcggtgcatggcgggcaggccctgcacctcgtgcagcgggtcggtaaagcggatgtcctggctgtacaggctgtcgagcaagtgcaggttgtgcttgtccagcgtggaaaaggcctgggcgaagcggcgcaggaagtcactcatactcgccccctgcagcttgtcgcgagggcaggctgcggaaggcggccagggcgcgttcacgggactttttcaggtcgacaatcgaacgcgggtaatccgccacgccgaacaagccaccggcggcttcggggttgtgtacttcttttttattcagcgcggccagttccggcagccagtgcttgatgaacacgccttcgctgtcgaatttttccgactggctcaaggggctgaaaatccggaagtatggcgccgagtcggtgccggtggacgaactccactgccagccgccgttattggccgccaggtcgccgtcgatcaggtggcgcatgaagaaacgctcgccctcgcgccagtcgatcagcaggttcttggtcaggaacatcgccacgaccatgcgcagacggttgtgcatccagccggtttcgagcagttggcgcatggccgcgtcgatgatcggcaggccggtgcgcgcttgctgccaggcggccaggtccttgggcgcgttgcgccaggcgacggcttcggtctcggggcggaacgcccggtggcgcgacacccgtgggtaacccaccaggatgtgcttgtagaactcgcgccaaagcagttcgttgatccaggtgatggcgcccatgtcgccgctttcaaactcgccgccgttggtttgcaacgcggcgtgcaggcactggcgcggcgataccacgccggcggcgaggtacgccgacagctggctggtgccgggcttggcggggaagtcgcggtcgtccttgtagtagctgatctgttggtcggcgaaggcgtcgaggcggcgccgggcttcggcttcaccagcaggccagagcgcgcgcagagtctcgctgggcggctcgaaaccgtcgactgtcttagggactgggtcgcttttgagcgtgagcgcagcctgggccttgggggccgcgactatccgcggcagtgcgctgtgcaggcggctgtagcagaccttgcggaattggctgaatacctggaagtaggtgccggtcttggtcagcacgctgccgggttggaaaaacagttggtccaggtagctgtggaagctgatgcccgccgactccaatgccttggacacggccgcatcgcgacggctttcatgaatcccgtattcctcgttgacgtgcaccgactccaccgccagttcacggcatagcgtgcccagcacgtcgggcgcctggtcccaggtggcggcggtacggatcagcaggggaatgttcagttcgccgagggttttgcccaggtcgtccaggttgcgcagccagaaatccaccttgcacggtgcatcgtcatgggccagccattgttcgggcgtgatcaggtacacggcggcgatcgggccccgctggctcgcggcggtcagggcggtgttgtcgtgtaggcgcaggtcggtgcgcagccagatcaaatgcatttaaacgagtccacgctggatcagtagctggtgggccgacaacaactcttcggcgacgaacaattcagggatgtcatgggttaatacggccaactcggcctggtggatgcataccgttggtccgacgatcaactttgggcaacggacgccgcccaaaagttttgccagccccgacacatgcagcgctttgctcgaatacaacagcacggcccgcggttgcaggtgctccaccgccagggccagttcgccagcgggcaaaggccagtcgaacacttccaccgggcaatcggcactgctggcgagccaggcgctgagccacaggtgtggctccaggggcaggtcggactgattgaccagcaacaacggcgcgccgtgcaactggcgattgttgtggtaaatgcgtgcgccgaatttgctgcgcagccatgagaggaaaaacacccgctccatctgcgcgccgaactggccttgccaacgctgttccaactctcgcagcagcggcagcatcaattgctcgcacaacgtgcgtggcgggtacagcgccatggcctggttgaaggcgtcatcgacccggcgttcgctcaattcgctgatggcttgcaccaggttctggcgcaggctgtgccactcgttttccaccgcctcaggaagggactgggccgagtcgatcaggcctttgacctggctcaccggcacgccgcgattgagccaggtgaggatggtgtggatgcgctgcacatgctcggcactgaacagccgatggcccttgggcgtgcgctggggcacgatcaggccgtaacggcgttcccaggcgcgcagggtcacggcgttgacgccggtctggcgcgccacttcgcggatcggcagccagccatcttccagtgcttgggcgatgtcgtcgccgggttcgtctagcagggcagctttcatggtctagatcgcatttcgcaggctgaggttttccgggtgcggttgcaggtaggcctgctgcgcgatgtagcggtccgggtgttggcgaaagtggtgtttgagcagggtcagcggcaccaccagcggcacgatgccgtggcggtactggccgatgacggtctgcatttcctgcttgtcatcggcgctgatgacctgcttgaggtaaccgctgatgtgttgcagcacgttggtgtgggtgccacgtgtggcgcattgggtgaggccggtcatcaagtcgctgaaataacgggtcgccaattcatcgagctgggtgcccttgttcatgctgcccagcaggtggccaaggcttttgtagtgtgccgggctgtgggccatcaacaagtatttgtagcgcgaatgaaaggccagcaggcggtggcgtgtcaggccttcggccaacagtttctgccagctggcgtagacgaatacgcgggtcaggaagttttcccgcagcaccgggtcgttcagccgaccgtcttcttccaccggcaggttgggatggcgcgcacagaaggcctgggcgtaaatgccgcgcccgccgccgtccaccggcgtgccattgtcacgatagaccttgacccgctccaggccgcacgacggcgatttctgcatgaagatgtagccgcacaggtcggtatgttccgcagccatctgctggccgtaatcgtccagcggctgggtgacattcaactcgcggttcacggtgccgacggcttgcgggtgggaggggtctcccaccagacggatcggttcgcgtggaatgcccaggccgatggcgacttcggggcacagcggcacgaagtcgaaatagtcggcgagggtctggctgcacagcagggattgtttatggccgccgttgaagcgcacgttctcgcccaacaggcaggcgctgatggcgatcttcggtttggtggtgctggacatacacgaaccctcagcgagattcctgtacaagatttaaatcctgtacaactaaatctcatcataggttcgatgctgtacaagtcaaattatttgtacaagttttgcgagtgcgctatttccagccgattttccaggcgtcgatatcctgcagggtttgccagggcaggcgctcgctgcggtgtgtcatcacggcctgcagttcaatgtcgagcaccgtgccttcttcatcacgaaacagctcggtgaccagaaagtgtttttctttgttgcgagggtggactgctgtccacttcgacagcagcaatttggcgggattgatgcggttcattgcaggtgctcgatcaagcgtcgtgcggcttcctggccgctgagccaggcaccttccacacggcccgacaggcaccagtcgccacacacgtacaggcccaggtcggcatcggccagcacaccgaattcgtggctgctggatggtcgagcatagagccagcggtgcgccaggctgaatgacggcgcgggcatggcgctgtgcagcagttcggcgaaggcgccgtgcaggtgctcgatcaccgcctctttgggcaggtccaggtgtgccttgctccaagcgctggtggcgtgcagcacccaggtgtcgagggtggtatcgcgcccaggtttgctgcggttgcgcgctagccagtcgagggggctgtcttgcacgaagcagccctccatcggggtatccaggggtttatcgaaggccagggcgatggcccaggtcgggtccattttcaccccggcggcggcactcgccagcttgggcgctgcggccagcaaggcggtggcctggggcgcaggcgtggcgatgatcacgtggctgaaggggccatggttttcgccgtccgcgtccagcaggttccagtggtgtttgccctggaacacctcggtgatgcggcaaccgaactccaccggcaggtcgtcgagcagggcgcgggtgattgcgctcatgcgcggcgtgccgacccagcggatctgttcatcgggggagggagtgagctggccggacttgaagttgtacagctggggcttccattgctcggcccagccgtggctttgccagcgttgcacttcgttgacgaagcgccggtcgcgggcggtgaagtattgcgcgcccatgtccagggagccggcatcgctgcgcttgctggacatgcgcccgccactgccgcggcttttatcgaagagttgtacaacgtgccccgcgtctcgtaacgctcgggcggcggagagaccggcgatgccggtgccgatgatcgcgatgggaacagtcatgggaggcctcgttttaccgttgtgcacagactacgcggacaccaatagctgtacaatattgttttttggtataagttttggcgtacctgttctaacggcgtaacctatggttaaagctgaggcttaagccagcgttacgcctgctaacaaatgatccctgtttataaaatagaccagtgatcggcggcgaacgttacatgaggagcgtcccatgcatattttgctgaccggcggtactggtttgattggccgccaactctgccaacactggctcacccagggccatcgcctgaccgtgtggagtcgccacgtggatcaggtcgccaaggtgtgcggcgctcaggtgtcgggagtcagccgcctgcaagaggttatcggcccggtcgacgcggtcattaacctggcgggcgcgcccattgccgaccgcccctggacccacaagcgcaaggcgctgttgtggagcagccgaatcagtcttaccgagaccttgctgacgtggcttgagggcctggaacaaaaaccggcggtgttgatttccggttcggcagtgggctggtatggcgatggcggcgagcgcgaactgaccgaagccaacggcccggtgcaggacgatttccccagccagctgtgcatcgcctgggaagaaaccgcccagcgcgccgaagctctggggatgcgtgtggtgctggtacgtaccggcctggtgctggcggcgcagggcggctttttgtcgaggctgttgctgccgttcaaactggcgctgggcgggcctatcggcagtggtcggcagtggatgccgtgggtgcatatcgaggatcaaatcgccctgattgattttcttctgcaccagcctgacgccagcggtccttataatgcctgcgcgccacacccggtgcgcaatcgcgagtttgcgaaaaccctgggccaggtgctgcaccgcccggcgttcatgccgatgccggcctttgcattgagggtgggcctgggcgagttgtccggcctgttgctgggcgggcagaaggcgctgcccgagcgcttgctggctgccggtttcactttccagttcactgagttgcgtgcggctttggatgacttgtccagccgcctctaaagataggatgttgcatgacggatcacgcgttgttactggtcaacctgggctcgccggcgtccacttcggtggcggatgtgcgcagctacctcaatcagttcctgatggacccttatgtgatcgacctgccgtggccggtgcggcgcttgctggtgtcgctgatcctgatcaagcgccccgagcagtcggcgcatgcctacgcgtccatctggtgggacgagggttcgccgctggtggtgctcagtcgccgcctgcaacagcagatgacttcgcagtggacccagggcccggtggagttggcgatgcgttatggtgagccgtcgattgaaagcgtgctgacccgtctcgccgcccaaggcattcgcaaggtcaccctggcgccgctgtatccgcagtttgccgacagcaccgtgaccacggtgatcgaggaagccaagcgcgtggtgcgcgacaaaaagctcgacgtgcaattctcgatcctgcaaccgttctacgatcagcccgaatatctcgacgccctggctgccagcgtaaggccgtacgtggaacagcattacgaccacctgctgctgagtttccacggtttgcccgagcgccatctgaccaagctcgaccctaccggccagcactgcttcaaggatgcagactgctgcaagaatgcgtccgccgaggtgctcaagacctgctatcgcgcgcagtgcttcagcgtcgcccgcgactttgccgcacgcctgggcttgcccgaagacaagtggtcggtggccttccaatcgcgcctgggccgcgccaagtggatcgaaccctacaccgaggctcgccttgaagcattggcccagcagggcgtgaaaaagctgctggtgatgtgcccggcgttcgtcgccgattgcatcgagacgctggaagaaatcggcgatcgcgggctggagcagttccgcgaggccgggggcgaggagttggtgttggtgccgtgcctgaatgatgatccgcagtgggcgaaggcgcttaataccctttgcgagcgcgcacccacggcgctgtaaccaaaccaagtgaagatcaaaatgtgggaggggacttgcccctcccacattttggttgtgttacaggttgagggtcaggctgaccgtgaggttgcgcggttcgcctgggctgatccagtagttgctgtaggaccgctcgtagtacttctcatcaaacaggttgttgaggttcaagcccacggtgacgttgtcggtggccttgtaatgggccagcagatcaaccgtgtggtaggccggcaattcgaaactcgtgccggcttcaccagagcggtcccccacataggtgaacgccgcccccaggtctgaaccgcgcaacgcaccatcctggaactcatacacccccaacaggctgccgctgcgcttggccacgccgagtatccggctgccggcaggaatgactttgtcgcccttggtcacttcagcatcaatgtaggcaaacgcgccaatcacccgtacggcgtcggtcacttgcccggacagttgcaggtcgaggccctggctgcgcgccttgcctacggcgcggttgaggttggtggccgggtccaggctcagcacgttttccttttctatatggaaggctgcgatcttagcgctgaggcgctcgtcgaacagctcgctcttgatccccacttcatagcccacgccttcctcaggcttgaaggacttgttgtcggcgcccaacccgctattgggcttgaacgaagtagaggcgttggcgaatacgccgacttgcggcgtgagctgatagagcaggccggcgcgctgggtaaaggcgttgtgggtttgctcggctttggcgtggttgcgggtgaagtcgtcgatacgctgctcgaaatgctcgaagcgcgctccgaccatgccgcgcaggcggtcggtgaagacgatctggtcttgcaggttcagcgcgtggctcttggtctgttcgaagaagtcggtgccggagcgcaggccgttgggtttggcctggccgtagaccgggttgtagatgtcgatgctgtagcggctaccgccaatcgccgtgacgcgctctttcttgcgatagtcctcgtattcggtgccgatcagcagttcgtgctgccaactgccgatgtcgaacaggccgcgcagctcgagctgggtaatgctgtcgtgccagcccatggagcgttcacggtagcggcggtcgatggtgtgaccgtcggcattcagtgcacggttttccgaggcgtcgccccacaggctgccttgtttgtagtggctggccagacgcagtttccaggcatcgttgaggtgatgctcaagggtggcctggagacgattgttgtggttgtcgatatcgccgtcgttgggttcgccgaggaaggtggaacgagatacgccgggggcgtcgacgatgccacggtcgaaggtagagctgtggcggacgaattcactctcgacgagcagactggtgtccgggtccagttgccaactgaacgaaggcgcgacgaatacccgcttgctctgcacgtgatcgcggaagctgtggttgtcttccaccgccaggttgacccgcgacagcaggttgccttcgccgtccagcggagtgttcacgtccacggcggtgcgatagcggtcccaactgccggcgctggtctgcacggtggtgaaggcttctggctggggcttcttggtgacaatgttcacggtgccgccgggatcgccgcgtccatacaggctggcagcggggcccttgagtacttcgatgcgctcgatattggccgcgtccggtgtactcgggtagccacggttggcgctgaaaccgtcctggtagaactcggacgtggtgaagccgcgcacgctgtattcgtacagagtcaggccgccgaagttgttttgcttggacacgccgccggcaaattccagggcgcgttccacgtgggtactgcccaggtccttgagcactgtggcgggaattacgctgatggattgcgggatgtcgcgaatggcggtgtcggtttttgtcgcgctggcggagcgggtggcgcggtagcctttgaccgggccggtggcggactcataggcgtcggtggtgacgctgatggtgtcgagttccagggtgttttcttcggcgaaggcggggtcgagcagcaaacccaaggccaggccagccatgggggcgattcttcgagacggcatgatagagcgttccaatagcgatattgaaacaatataacatgcctaatgagaatgacttgctttgaaatatcagtttacaggtgcccgggaaggggcacctgcaagcggcgacctattcctcttctttgaccggcgcgggcggcggacgcagcccgatttccgccagcaacttgatctctttgccgttgcgcatcacctggatcgccaccttctcggtcggcttgatccgcgccacctggttcatcgacttgcggccatcaccggccggttcgccgttgatgctgaggatgacatcccccagttgcaggccggctttctgcgccgggccatcgcggaagatcccggcgaccacgatgccagggcgtccggtcaagccaaatgactcggccagctccttggtcagcggctgtacctcgatccccagccagccgcgaatcacctggccgtgctcgatgatcgacttcatcacctccatcgccagcttcaccgggatcgcaaacccgatgccctgggagccgccggacttggagaagatcgccgtgttgatgcccgtcaggttgccattggcgtccaccaatgcaccgccggagttacccgggttgatcgccgcgtcggtctggatgaagtcttcgtagctgttaaggcccagttggttgcgcccggtggcactgataatgcccatggtcacggtctggcccacgccgaacgggttgccgatggccagcgccacgtcacccacacgcaaaccgtcggaacggccgagggtgatggagggcaggctcttcaaatcgatcttcaataccgcaaggtcggtttccgggtcgctgcccaccactcgggccagggtttcgcgaccgtcacgcagggccaccacaatctggtcggcgccggtggtcacgtggttgttggtaaggatgtaaccttcggggctcatgatcaccccggagcccaggctggactccatgcgacgctgcttgggtccgttgtcaccgaagtaacggcggaactgcgggtcttcaaacagtggatgggccggtttgttgatcaccttggtggtgtacaggttgaccacggcaggggcggcgatcaccacggcatcggcgtaggtcaccgggccttgcaccaccgaattgctttgcggcgcctgttgcaggttcacatccaggctgggcagccccaccagctcggggtaacgctgaataatcagcatcgcgatcagcacgccagccagcaatggccatccaaaaaaacgcagcgccttgagcatcaagtaagtcctgacaggttgcagggggcgggagagcgcccataatgtcgcgcattatacgaggctgtgacgcctgcgaaccggatatttaggagtcttttatggccgtcccccttaccaccctcgtcgaggaagcggaccgctacctcggcagcgcaaaaattgccgattactgccccaatggcctgcaggtcgagggccggccacaggtgatgcgcatcgtcagcggcgtgaccgccagccaggccctgttggacgcggccgtcgaagcccaggcggatctggtcctggtgcaccacggttacttctggaaaggcgaaaacccgtgcatcaccggcatgaagcagcgccgcctgaagacgctgctcaagcacgacatcagcctgctggcctaccacctgccgctggacctgcatcccgaggtcggcaacaacgtgcagttggcccgtcaactcgacatcaccgtcgaaggcccgctggacccgggcaatcccaaaatcgtcgggctggtcggctcgctcgccgaaccgctgtcacctcgcgactttgcccgccgcgtgcaggaagtcatgggccgtgagccgttgctgatcgaaggcagcgagatgatccgccgcgtcggctggtgcaccggcggtggtcagggctacatcgacgacgcgattgcggccggtgtcgacctgttcctcagcggcgaagcctccgagcagaccttccacagcgcccgcgaaaacgacatcagcttcatcgccgccggtcaccatgccactgagcgctacggcgtgcaggcgctgggcgattacctggcgcggcgcttcgcgttggagcatttgttcatcgattgtcccaacccaatctaacaaacaccaccgaacaaatgtgggagggggcttgcccccgatggcggtggatcagctactcatgcagtgactgacacatcgctatcgggggcaagccccctcccacacttgaccgcgattaaccccaaactccgtggtatatccatataccgtttcggtctagtaggccgcctgaatagaagcaggtgctgtgctagcatgccccgctcgaacacggcccgctggccgtccataagatcgtttttccgtgagtaaccatggtcgacaaactgacgcatctgaaacagctggaggcggaaagcatccacatcatccgcgaggtcgccgccgagttcgacaacccggtgatgctctactcgatcggtaaagattccgccgtgatgctgcacctggcacgcaaggccttcttcccgggcaagctgccgttcccggtgatgcacgtcgacacccgctggaaattccaggagatgtacaagttccgcgacaagatggtcgaagaactgggcctggacctgatcacccacgtcaacccggacggcgtggcgcagaacatcaacccgttcacccacggcagtgccaagcacaccgacatcatgaagaccgaaggcctcaagcaggccctggacaagcatggtttcgacgcagcctttggcggcgcccgtcgcgatgaagagaaatcccgtgccaaagagcgcgtgtactcgttccgcgacagcaagcaccgctgggacccgaaaaaccagcgccccgagctgtggaatgtctacaacggcaacgtcaacaagggcgagtcgatccgcgtgttcccgctgtccaactggaccgaactggacatctggcagtacatctacctggaaggcatcccgatcgtaccgctgtacttcgccgccgagcgtgaagtgatcgagaagaacggtacgttgatcatgatcgacgacgaccgcatcctcgagcacctgtccgacgaagacaaagcccgaatcgtcaaaaagaaagtacgtttccgtacccttggctgctacccgttgacgggcgcggtggagtccgaagccgagacgctgacggacatcattcaggaaatgctcctgacgcgaacttccgagcgccagggccgtgtcatcgaccacgatggcgcaggctcgatggaagataaaaaacgtcaaggttatttctaaggggctgtcatgtcgcatcaatctgatttgatcagcgaggacatcctcgcctacctgggccagcacgagcgcaaggaaatgttgcgcttcctgacctgtggcaacgtcgacgacggcaagagcaccctgatcgggcgcctgctgcacgactccaagatgatctacgaagatcacctggaagccatcacccgcgattcgaagaagtccggcaccaccggtgacgacatcgacctggccttgctggtcgacggcctgcaggccgagcgggagcaaggcatcaccatcgatgtcgcctatcgctacttctccaccgccaagcgcaagttcattatcgccgacacccccggccatgagcagtacacccgcaacatggccaccggtgcgtccacctgtgacctggcgatcatcctgatcgacgcgcgctacggcgtgcagacccagacccgtcgccacagcttcatcgcctcgttgctgggcatcaagcacatcgtggtggccgtcaacaagatggacatcaatggctttgaccaaagcgtattcgagcagatcaaggccgattacctgaagttcgccgacggtatcgccttcaagccgagcaccctggccttcgtgccgatgtcggcgctcaagggcgacaacgtggtgaacaagagcgagcgttcgccctggtacaccggccagtcgctgatggagatcctcgaaaccgtcgagatcgccaacgaccgcaattacaccgacctgcgcttcccagtgcagtacgtcaatcgtccgaacctgaatttccgtgggttcgccggcaccctggccagcggcatcgtgcacaagggcgacgaagttgtggtgctgccgtcgggcaagagcagccgcgtcaaatccattgtcaccttcgaaggtgagctggagcacgccggccctggtcaagcggtgacgctgaccatggaagacgagatcgatatctcccgtggcgacctgctggtgcatgccgacaacgtgccgcaagtgactgacgccttcgacgccatgctggtgtggatggccgaagagccgatgctgccgggcaagaaatacgacatcaagcgcgccaccagctacgtgccgggttccatcaccagcatcgtgcaccgtgtggacgtgaacaccctggccgaaggcccggcgagcgcgctgcaactgaacgagatcggtcgggtcaaggtcagcctcgacgccgccatcgcgctggacggttacgacagcaaccgcaccaccggtgcgtttatcgtcatcgaccgtttgaccaatggcacagtagccgcaggcatgatcatcgccccgccggtcggtcacggcagtgcggcgcagcacggcaagttggcccatgtggccaccgaagagcgtgcactgcgcttcggccagcaaccggccaccgtgttgttcagcggcctgtccggcgctggcaagagcaccctggcctatgcggtcgagcgcaagctgttcgacatgggccgtgcggtatttgtgctggatggccagaacctgcgccatgacctgaacaagggcttgccgcaggaccgtgccggtcgcaccgagaactggcgtcgtgccgcgcatgtggcgcgtcagttcaacgaagccggcctgctgaccctggccgcgttcgttgcgccggatgccgaaggccgtgaacaggccaaggcgttgattggcggcgaccgtctgctgaccgtctacgtgcaggcgtcgccgttggtgtgcgccgagcgcgatccgcaaggcctgtacgcggccggtggggataacatcccgggcgaatccttcccgtacgacgtgccgttgaatgccgatctggtgatcgacacccaggccctgtcactggaagaaagcgtcaagcaagtgctggagttgttgcgtcagcgcggcgcgatctaaagcctgtcgcaatcaaatgtgggagggggcttgcccccgatagcggagtgtcagtcagtacatctgttactgacccaacgccatcgggggcaagccccctcccacattcttgatcattgtttacctgggaattctctatgcagctgctccagtagctgatccttctgttcccagagctggttgatccagccctggaacgccaaccgatattccccatcctgctcataattcttgccaatgaattcggtcgggatctgcacctcttcaaactgcaccaccacgtcccgcacattcccgcacagcaaatcccaataacctgggcgcccagccgggtagtgaatggtcacgttcaccagtgacttcaactgctcccccatggcatccagcacaaacgcaatcccgccagccttgggcttgagcaggtaacggaagggggacttttgctgcgcatgcttgcctggggtaaaccgcgtgccctcggcaaagttgaaaatacccaccgggttgtcgcgaaacttcgcgcaggtcttgcgagtggtttccaggtccttgcctttcttttccgggtgtttctccaggtaggccttggtgtagcgtttcatgaacggaaagcccagcgcccaccacgccaggccaatcaccggcacccagatcagctcctgcttgagaaagaacttcagtgggcgaatccggcggttcagcacgtattgcagcaccatgatgtcgacccagctctggtggttgctggtgaccagatacgagtgctggtagtccagcccttccagcccggtgaggtgccagcgggtgcgtcgcaccaggttcatccagcccttgttgttggtcacccatgcctcatgggtgtggttcatcagccattcgctgaaacgcttggcaaacggcagggccttgaacagcgccacgataaacaggaacgaacacaacaggatcgtgttcagcgccaacaacagcgatgcaatcaccccgcgcatggcggcaggtagaaaatccagcatttagatatccataggtcggttggcggcttggatcgcagtgagcgcgatggtgtacacgatgtcgtccacctgggcgccgcgcggcaggtcgttgaccggtttgcgcaggccctggagcatcggccccaggctcacgcaatcggcactgcgctgcacggccttgtgcgtggtgttgccggtgttcaggtcggggaacacaaacactgtggccttgccggcgacctggctgttgggggccaattgccgggccacgttttcgttggcggcggcgtcgtattgcagtgggccgtcgatcagcagcgagctttgctgttcgtgggcgagcagggtggcttcgcggactttctccacttcttcgccgctggccgaatcgccgctggaatagctgatcatcgccacgcgcggggtgatgccgaacgcggctgccgagtcggcgctttgcagggcaatctctgccagttcggcggcgctcgggtgcgggttcatcacgcagtcgccgtacaccagcacctgctcggggaacagcatgaagaacaccgacgacaccagggtgcagcccggcgccgttttaatcagctgcagggcagggcggatggtgttggcggtggagtgaatgacgccggacaccaggccgtccacctcatcgagggcgagcatcatggtggcgatcaccacggtgtcttccagttgctgctcagccatcggcgcgttgaggcttttgctcttgcgcagcgccaccatcggctcgacgtagcgctggcggatcaggtccgggtcgagaatctccaggccttcaggcagttcgataccctgggcgcgggcgactgcttccacatccgccggcttggccagcagcacgcagcgcgcaatgccccgcgcctggcagatcgcggcggcttgcacggtcagcggctcgctgccttcgggcaacacgatgcgcttgttggcggcctgggcgcgctggatcagttggtagcggaacaccgccggcgacagacgcatttcccgtggtgtgccgcaacgttggtgcagccagcgcgcatcgaggtggctggcgacgaaatcggtgatgatttccgcacgctcgcggtcatcaatcgggatttccttgttgaggctgttgagctggttggcggtgtcgtaggaaccggtgctcaccgacagcaccggcagcccggcctggaacgcgccacggcacaactccatgatgcgcgggtcgggcagggtgtcgctggtcagcagcaggccggccagcggcacgccgttgatcgcggccaggctgacggcgaggatgatgtcgtcgcggtcgccgggcgtcaccaccagcacgccgggcttgagcagctccacggtgttacgcatggtgcgcgcgcagatgatgatcttggtcatgcgccgggtttcgtagtcgccggcgttgaggatctgcgcgcccatcaggtcggccacgtcgcgggtacgcggtgcgttgagttccggttgatagggaatgcagccgagcaagcggaaatcaccgctgcgcaacagcggcgaatgttccttgaggcgtgccgagaaggcttccatgctttcgtcggtgcgcaccttgttgaggatcacgccgagcactttggggtctttcgggccgccgaacagttgggcctgcagctcaacacgcccggagagttcggtgagcacttcgttttctggtgcggacaccaggatcacttccgcatccaggctcttggccaggtgcaggttgacccgcgccgcatagctggcgctgcgggtgggcaccatgccttcgacgatcaatacgtccttgcccaccgcggcttgctggtacagcgtgatgatttcttcgagcaactcgtcgagttggccgtcgccgagcatgcgctctacgtgggccaggcccagaggctgtggcggcttgaggccgtgggtgcgcgccaccagctcggtggagcgctcggggccggtgtcgccggggtgcggctgggcaatcggcttgaaaaagccgactttcagcccggctcgctcaagggtacgcaccagcccaaggctgatggaggtcagacccacaccaaaatcggtgggcgcgataaaaaaagtctgcatgcggattctctggaggtgcatggcttgggtgacgctctatggctgagcgtctaccgcgaatcaggcgccaaggttatcgttaatcgcgctcctgcgcacaccagccgcaggcaaagggctggcctaatttttcaatacgttgcgcggggtccagcacccaggcgcgtgactgccagggtggctggtggcgcaggtgctgggtgtggccgcaggacagctcggcgacccagtgctggtcgtcgtcctggtggaacccgatgatgaaggatgccgttgatcggtcccgtctgtccgggttctgttcgctttcgggcaaatccttgtttagacttgtccgttcttcattcttatgcaaaaggtctcgccccatgacgatcgccgctaacaaggctgtctccatcgactataccctgaccaacgacgctggtgaggtcatcgacagctcagccggcggcgcgccgctggtctacctgcaaggcgcaggtaacatcatcccaggcttggaaaaagccctggaaggcaagaatgtcggtgatgagctgaccgttgccgtagaacctgaagatgcctacggcgagtactcggccgaactggtcagcaccctgagccgcagcatgttcgaaggcgttgacgagctggaagtcggcatgcagttccacgcctccgcaccggacggccaaatgcagatcgtcaccatccgtgacctggacggcgacgacgtcaccgtcgacggcaaccacccgctggctggccagcgcctgaacttccaagtgaagatcgttgccattcgcgacgcttcccaggaagaagtggcccacggccacgttcacggtgaaggcggtcaccaccattgattgtggtttgatcaatcggtagcaaaaacgccccgactggttcggggcgtttttttgtgcctgaaaaaatgtgagagggggcttgcccccgattgcagtatgtcagtcagtacattctttactgacccaccgtcatcgggggcaagccccctcccacaacaaaaatgccccggacctttcggtacggggcatttcttaactgtttcgcaacctgggctgcgtagcagttgttaccacttaggctgcagcagcaacgctcagagccttgatgtggccattcaggcggctcttatggcgagcggccttgttcttgtggatgatgcctttatcggccatacggtcgataactggcacagccagaacgtaagcagcttgggctttttcagcgtctttggtgtcgatggctttaactacattcttgatgtaggtacgaaccatggaacgcaggctggcgttgtggctgcgacgcttctcagcctgttttgcacgttttttggcggaaggtgtgttggccaccgtcgagctcctcgaaagactttttaggaaatagcaaacaaaataggccgcgaatcatgccgatgacttgatgggttgtcaagggcggctgatgcgaactgctgagtggtcgatctgaagaggcgggtgatttatttccggcgcttgacctgtaaactcgcgagctttggctctgtgctgttgcaggcgcgcagtatcgcataagtgggcgctttgtacgcctgctctttatctaaaggcgcaaactctttcaatgaatctgctcaaatcgttggccgccgtcagctctatcacgatgatctcccgggttctggggtttgtgcgtgacaccctgctggcgcgcatttttggcgccagcatggccacggatgccttctttattgcgtttaaattgcccaacctgctgcggcggatcttcgccgaaggtgcgttttcccaggcattcgtgccgatcctggccgagtacaagacccagcagggcgaggaagctacccgtacctttattgcctatgtgtccggcctgctgaccctggtgctgatgctggtgacgattctgggcatgctcgccgccccctgggtgatctgggccacggcccccggttttgccaataccccggaaaaattcgcgctgaccaccgatctgctgcgagtgacctttccttatatattgctgatctccctgtcgtccctggccggggcgatcctcaatacctggaaccgcttctcggtgccagccttcgtgccgaccctgctgaacgtcagcatgatcatcttcgcgctgtttctcacgccgtacttcgaccctccagtgatggcgctcggctgggccgtgctggccggtggcctggcgcaactgctctaccaactgccgcacctgaaaaagatcggtatgctcgtattgccacgcctgaatctcaaggacaccggcgtatggcgcgtgatgcgcaatatgctgccggcgatccttggcgtgtcggtcagccagatttcgctgatcatcaacaccgcattcgcctcgctgctggtatcgggctcggtgtcgtggatgtactacgccgaccgcctgatggagctgccctccggggtgctcggcgtggccctgggcacgattctgctgccgaccctgtcgcgcacctacgccagcaaggaccgccaggaatactcgcgcatcctcgattggggcctacgcctgtgcttcgtgctggtgttgccgtgcgcactggccctggggatcctggctgagccgctgactgtgtcactgtttcaatacggccaattcgatgcccacgacgcactgatgacgcagcatgccttggtcgcctattccgttggcttgctcggcatcatcgtgatcaaggtgcttgcgccaggcttctatgctcagcaaaacatccgtacaccggtaaaaatcgcaattttcacgctgatcgtcacacaactgctcaacctggtgtttatcggcccgctggcccatgccggcctggccttggccatcagtgcgggcgcgtgcatcaacgcagggcttttgttttaccagttgcgtaagcagcagatgttccagccgcaggccggctggggtctgttcaccctcaagctgctggtggcggtcggggcgatgtcggccgtgttgctggggttgatgcacttcatgccggcgtgggatgaaggccatatgctggagcgcttcatgcgtcttggcgtgttggtcgtcgcgggtgtggtggtgtacttcgggatgttgctgctgcagggcttccgcctgcgggatttcaatcgcaagtccctgggttagagagtttgccgcgataaaacggttgttttatcgattcgacccatttggcccgttcagttgcctgtcgtccggggccgggtgtggttataatcgaccactttatgagcaagaagcgcgttatgcagctggttcgaggtctccacaacctgcgccccgagcatcggggctgcgtcgccactattggcaactttgacggtgttcaccgtggccaccaggctatcctggccaggctgcgcgaacgtgcggtcgagttgggcgtgcccagctgcgtggtgattttcgagccgcagccacgggaatactttacgcccgagactgcgccggcacgcctggcccgtctgcgtgacaagttgcaactgctggcggaagaaggcgttgaccgcgtcctctgcctggctttcaaccagcgtttgcaaagcctgagcgctgccgagttcgtcgaccgcatcctggttgatggcctgggcgtacagcacctggaggtcggtgacgacttccgcttcggttgcgaccgggtcggggatttcgatttcctgcaacaggccggcgtcagccagggttttaccgtcgaagccgcgcaaaccgtcgagctggacggcctgcgcgtgagcagtacccaggtgcgtaatgccctggcggctgccgacttcgccttggccgagcgtttgctcggtcgcccgttccgcattgccgggcgggtcctgcacggccagaagctggcgcgccaattgggcacgccaaccgccaacgtgcaactcaagcgccgtcgtgtgccgctgaccggggtttacctggtgagcgtcgacatcgacggccaatcgtggccgggagtcgccaacataggcgtcaggcccacggttgcaggtgatggcaaggcccacctggaagtacatctgctggattttgccggtgatctgtatgaccggcgtttgacggtggttttccaccagaagctgcgtgaagagcagcgtttcgcctcccttgaggcgttgaaaacggcgatcaatgcggatgtcgccgccgcccgtgcactagccgcacctagcgcccatcgctaaccgaagagccttaaatgaccgactataaagccacgttaaaccttccggacaccgccttcccaatgaaggccggcctgccacagcgcgaaccgcagatcctgcagcgctgggacagtattggcctgtacggaaagttgcgcgagattggcaaggatcgtccgaaattcgtcctgcacgacggccctccttatgccaacggcacgattcacatcggtcatgcgctgaacaagattctcaaggacatgatcctgcgctcgaaaaccctgtcgggcttcgacgcgccttatgtcccgggttgggactgccacggcctgccgatcgaacacaaagtcgaagtgacctacggcaagaacctgggcgcggataaaacccgcgaactgtgccgtgcctacgccaccgagcagatcgaagggcagaagtccgagttcatccgcctgggcgtgctgggcgagtgggacaacccgtacaagaccatgaacttcaagaacgaggccggtgaaatccgcgccttggccgaaatcgtcaagggcggtttcgtgttcaagggcctcaagcccgtgaactggtgcttcgactgcggttcggccctggccgaagcggaagtcgagtacgaagacaagaagtcctcgaccatcgacgtggccttcccggtcgccgacgacgccaagctggccgaggccttcggcctggcaagcctgggcaagccggctgccatcgtgatctggaccaccacgccgtggaccatcccggccaaccaggcgctgaacgtgcacccggaattcacctacgccctggtggacatcggtgaccgcctgctggtgctggccgaagaaatggtcgaagcctgcctggcccgctacgagctgcaaggttcggtgatcgccaccaccaccggctccgcgctggaactgatcaatttccgccacccgttctatgaccgcctgtcgccggtatacttggctgactacgtcgaactgggttcgggtaccggcatcgtgcactgctcgccggcctacggcgtggacgacttcgtcatctgcaagaagtacggcctggtcaacgacgacatcatcaacccggtgcaaagcaacggcgtctacgtgccttcgctggagttcttcggcggccagttcatcttcaaggccgaccagccgatcatcgacaagctgcgcgaagtcggtgcgctgatgcagaccgcgaccatccagcacagctacatgcactgctggcgccacaagaccccgctgatctatcgcgccactgcgcagtggttcatcggcatggacaaagaaccgaccagcggcgacaccctgcgtgtccgctcgctcaaagccatcgaagacaccaagttcgtcccggcctggggccaggcgcgcctgcactcgatgatcgccaaccgccctgactggtgcatctcgcgccagcgtaactggggcgtgccgatcccgttcttcctgaacaaggaaagcggcgagctgcacccacgtaccgtcgaactgatggaacaagtggcccagcgtgtcgaacaggaaggcatcgaagcctggttcaagctggacgctgccgagttgctgggcgatgaagcgccgcagtacgacaagatcagcgacaccctcgacgtgtggttcgactcgggcactacgcactggcacgtgctgcgcggctcgcacccgatgggtcacgaaaccggcccgcgtgccgacctgtacctggaaggctcggaccaacaccgtggctggttccactcgtcgttgctgaccggttgcgccatcgacaaccacgcgccgtaccgcgaactgctgacccacggcttcaccgtcgacgagacaggccgcaagatgtccaagtcgctgaagaacgtgatcgagccgaaaaagatcaacgacaccctgggcgccgacatcatgcgtctgtgggtcgcgtcgaccgactactcgggtgaaatcgccgtgtcggaccagatcctggctcgcagcgccgatgcctaccgtcgtatccgtaataccgcgcgcttcctgctgtcgaacctgaccggtttcaacccggtcaccgacctcctgccggccgaggacatgctcgcgctggaccgttgggccgtggaccgtaccctgttgctgcaacgcgagttgcaggaaaactacggcgaataccgtttctggaacgtctattcgaagatccacaacttctgcgtgcaggagttgggtggtttctacctcgacatcatcaaggaccgccagtacaccaccggcaccaacagcaaggcgcgccgttcggcgcagaccgcgctgtatcacatcagcgaagcgctggtgcgctggatcgcaccgatcctggcgttcaccgccgacgaactgtgggaatacctgccgggcgagcgcaacgaatctgtgatgctcaacacctggtacgacggcctgaccgaactgccggccggcttcgaactgggccgcgagtactgggaaggcgtgatggccgtgaaggttgcggtgaacaaggagctggaagtacagcgtgcggccaaggccgtcggtggcaacctgcaagccgaggtcaccctgtttgccgaagacggtctcaccgccgacctggccaagctgagcaacgaactgcgcttcgtgctgatcacttctaccgcgagcctggcgccattcgcccaggccccggcggacgcggttgccaccgaagtgccgggcctcaagctcaaagtggtcaagtcggccttccctaagtgcgcccgttgctggcactgtcgtgaagacgttggcgtgaaccccgagcatccggaaatctgcggtcgttgcgtcgacaatatctcgggcgctggcgaggttcgccactatgcctaacgccagtcgtttcggacgtctgggctggctcgtactgagtgtgctggtcctggtcatcgaccaggtcagcaaggctcatttcgaaggctccctgcagatgttccagcaaatcgtggtgatcccggattacttcagctggaccctggcctacaacaccggcgccgccttcagcttcctggctgacagcggtggctggcagcgctggctgtttgctctgatcgccgtggtggtcagtgcggtgctggtggtgtggctcaagcgcctgggtcgcgatgacacctggctggccatcgccctggccctggtgttgggcggcgcgctcggcaacctgtatgaccgcattgccctgggccatgtgatcgacttcatcctggtgcattggcagaaccgccattacttcccggcgttcaacttcgccgacagcgccatcaccgtcggtgcaatcatgctggcgctggatatgttcaaaagcaagaaaaccggagagaccgtcaatgactgatcaggtattggctgagcaacgcatcggccagaacacggaagtcactttgcatttcgcactgcgcctggagaatggcgacacggtcgacagcacgttcgacaaagccccggccaccttcaaggtcggcgacggcaacctgctgccgggtttcgaagcggccctgttcggcttcaaggccggcgacaagcgcaccctgcagatcctgccggaaaacgcctttggccagcccaacccgcaaaacgtacagatcatcccgcgttcgcagttccaggacatggacctgtcggaaggcctgctggtgatcttcaacgatgcggcgaataccgaactgccgggtgtggtgaaaaccttcgatgacgcgcaagtgaccatcgacttcaaccacccgttggccggtaaaaccttgacctttgacgttgaaatcatcgacgttaaagcgctctgatcaacaacacacaattaaatgtgtgaagtgggcttgtgtgggagggggcttgcccccgatagcggtggaacagtcaggggtttgtttactgacccaccgccatcgggggcaagtcgaatcgtcgcaccgcccctccctcctttgatcttcattttcggttgggttagcgtcacaccagacccaaatagctgcaagacacgaggcacagcatgcaaatcaaactcgccaacccccgtggcttctgcgccggtgtggaccgggcgatcgaaatcgtcaaccgcgccctggaagtcttcgggccgccgatttacgtgcgtcatgaagtcgtccacaacaaattcgttgtcgaagacctgcgtgcacgtggcgccatctttgtcgaagagctcgaccaggtgccagacgatgtgatcgtcatcttcagcgcccacggtgtatcccaggcggtgcgtaccgaagcggcaggccgcggcctgaaagtcttcgatgctacctgcccactggtcaccaaggtgcacatagaagtcgcgcgctatagccgtgacgggcgcgagtgcatcctgatcggccacgccggccacccggaagtcgaaggcaccatggggcagtacgatgccagcaatggcggctccatttatctggtggaagacgaaaaggatgtcgccaacctgcaggtacagaaccccgagcgcctggcattcgtgacccagaccaccctgtccatggacgacaccagtcgcgtgatcgacgcgctgcgcagtcgcttcccggccattggcggcccgcgcaaggacgacatctgctacgccacccagaaccgccaggacgcggtcaagcaactggcagacgaatgcgatgtggtcctggtagtcggcagccccaacagttccaactccaaccgcttgcgtgagttggctgagcgcatggcgacgccagcgtacctgatcgacggtgccgaagacatgcagcgtagctggttcgatggcgtcgagcgtattggtatcacggcgggtgcttcggccccggaagtgctggtgcgcggtgttatccagcagttgcacgcctggggcgccaccggtgccgatgaactggctggccgcgaagagaacatcacgttctccatgcccaaggaactgcgggttcgctcgctgctgtaaaaaaccggcgtgccggatcaactccggcacaatgcctgctcggcacgctcgctgcgcaggctgatgcgcccgctgggtgccagcactacctgatacaggctctgcgcctggtccgcggcacacacatgcacggtgccggcacggaagcctccccctgaaaagatgggctcacccagcccgctgaagcgcacctggttcttgagcggcccattgcccacgatcggcgcttgcctgctggcctggtgctccaacagcaccgggttgtcatcgtccagggggccgcgcccgctgatgtccacgatgacccgccaccccaggccccaatcatccctcagtgcgtgaatgaccaccgcccggttgcgtgcgatggcttcggtgcgtgcataacgcaggccttgcgtcaaggactgtgctgcgctctgtcgctgctgtgactccagcaggctcttgaaactcggcaccgccaggttggccagaatgccgctcacgatcagccccagcagcagttcgatcaaggtgaaccctcgttgttgcatgtgccatccctccgtggatttgggtgtagtcctagttatagcgtcccgtctgtggtgcggatgatggccttcatgtccaaagtatttccctttgttccggttgcagcgcaggtgaaaaaccggcgctagtcttgggccgcacagcagggtttacctgctctttttcggacctcgacacggatgacgacggtaatgcttgcctgcacgaacacctgtttgcccaacgccttatcccgctaccaagccggtacgacactgatcgaagtgctggtcgcggtgttgattctcaccattggcctgctgggtgcggcggtgatccaactcaatgcgctcaagtacaccgacagttccaggatgaccagccaggccagtttcattgcctacgacttgctcgaccggatccgtgccaattctgctgccgactacacgtggggccgggccgagcgtgccttggccggcaatgttgccgccagtgcgcgcgacctggacttgcatgatttcgaggccaacattctcggttttgccggggagagcgccaaaggctcggtgtcgatcagtggcggcgaggtgacggtcagaatcagttgggatgacagtcgaggtacaggcaggccgggtgcccgggaaaccttcaccctgaccagtcgcatccgcgatgaaccgggagtggcgcaatgaggtgtcttgttcgaggtttcagcctggtggaggtgctgctagcgttggcgatggggctggtactggtgctctgggccagccaggtggcaattcagtccagggctactcatgccagccagcaggccgcgctgttgatgcaggatgatgcgcggtttgtgctgggcaagctgctccaggatatccgtcaggcgggcatgttcggctgtctggcgacagcgtttatcgacaacgccccgcccgcttttgaccggcctgtcgcttggcgtgtcggaggcggatcaacctcgctgacgctggtgaccgcggaggtcgccgttggaagcggcacgcctgactggactgtattgtccgattgcacaggcagcgcccacgcctacgcgggaagcgccccggcatcggcacccgggcaaatccgttttgcgttacgccaagttacctacaccttcgaagcagggcagttgaaagtcagtacgcctgcatcacccgccaaggcggtattggtggataacgtgaaggcattcgatatcagtttcggcgtgtccgccaaacctgcgtcaacggaagtggtgcgctacgacgccggcccggccgacgaatccttgatacgcagtgtgcgcattgtgatgacgctgcaagaccctaccgcccgggtgaaagatcaaacctacagcgtcgtggcggcgctgcggaaccgactggggtagggctaccatgatgcatttagagcgttttcgtctgcgacaggcgggcatggtgctgctggtcagcctggtgttgctgctgctgttatcgctgatcggcttatcctcgatgcaggctgcgctcactcagcaaaagattgccggtagtttctggcaccgtaatcagtcgctgcaaagtgccgagagtggcttgagattgggagaactccttgtaaggcgggcgtccgcaggcttgacgttgtgtcagtcaattgccacctgcgtgccgcccgctgaagcgttttcggttgtgggctccggaacccaccctgtctcgggcatcaagtgggtcgctctcaaaggcggggtttacggcattcagttcctgggccctgcggttgggctgacacatttaccggcacaaaccacggctgcggtgtatcgagtgacggcagtcgggctgcacgggcaattgcgcacggtgctggagagtacctatgcgcgggtagaagaggagggtggctcgcggtttcggcgagtggcatggcgacaacttcaataaggagtagtggaatgggcatggacagccagggttttaccctgatcgagttactgatcgccgtggtgatcattgcggttctggccgggattgcttaccccagttacaccggccatctgaaaaaagtctatcgcgctgaaatcgttgcgctgttgaccgagcaagcacaggacctggagcgcttttatgcgagaaacggcagttttattgatgcagccggcctcagtgcaggcaatgatcgctatagaatcaccgctgcattgaaccctcaggacttccaactggtggccacaccggtcgccgactcggtgatggctggcgatccttgcggggatttcggcctgaccggcgcgggcacgcggaccaacccgggcgctgcgccgcagatgtcgcgcaagctgtgctgggggcaatgatgagggtgctggatgattgggcgccgggtgcgcttgttcctatttatcggctggatcaaatgatggcagagcaacagcaggtagtgattgtcggtggcggagtcatcggcttgttgacggcgttcaacctcgcgacccaagggcaggcggtggtgttgctggagcgtgctggattgggacaggaatcctcctgggccggcggcggcatcgtttcgcccctgtatccgtggcgctacagcccggcggtcacggccctggctcattggtcccaggatttttatccacagctggcgcagcgtctgttcgctgcgacgggcgttgatccggaggttcacaccacgggcttgtactggctcgatctggatgacgaagccgaagccctttcttgggccgcgcgtgaaggccgtcccttgagcaaagtggacgtgtcggccgcccatgacgccgttccggtgctgggcggcggttattcccaggcgatctacatggccaacgttgccaatgtgcgaaacccgcgcctggtcaaatcgctcaaggcggcgctgctggcgctgcccggcgtgaccattcatgaacagtgtgaagtgactggttttgttctggatgcgggtaatgtcgtgggcgtgaacacagctgatgggtcgatctacggcgatcaggtcgtactggccgccggcgcctggagcggtgagctgctcggcacgttgggcctgtcgctgccggtcgagccggtaaaaggccagatgattctgtacaaatgcgcttcggacttcctgtcgagcatggtattagccaaggggcgttacgcgatccctcggcgggacgggcacatcctgatcggcagtaccctggaacatgaaggtttcgacaagacccccaccgaaaccgcgctggaaagcctcaaggcatcagcggtggagttgattcccgccctggcggacgccgaggtggtcggacattgggccggtctgcgccctggttcgcccgaaggcattccctacatcggtcgtgtgccgggtttcaatggcctgtggctcaactgcgggcattaccgcaacggcctggtgcttgcgccggcgtcctgccaattgtttgctgacttgctactggcgcgcgcaccgatcatcgacccggcgccgtatgcgccggaaggtcggctcaacgctggatagattttggcccttgctccaggtgcgcctgggtgcaataccactcctggcgagagctcagggcgcgatcctgcggcagatgcacgccgcagtgggcgcagcgcaccatcagggccgcgtcaggctcgctggcacgatgctgcctggcggctgggcttttgaatttgcgccagaaccatactgcggcggcaatgacggcaatccagaacagtagacgaagcatgatgggcagtttctcgacaaggaatgcgccagtttagccaaggacgtgccaggcgcacagcgcaataataccgcccacaaaaaaggagcctcgcaaggctccttcttgatgacgccggtgcaatcagtcaaatacaccgaaggtcatgtagctgaaccacgagcggtcctggttgttgcctagggcctgcggtgcttcttcttcgatcacgtcgccgttttcatcatgcggcttgaggtccgaagggatggcgtccttggcgtcctggtactgcttgatgacgtcctggttggcgcgggtttcgcccggcggcagcggtggacgggactcgatcaggcccaaggtgtacttgctcagccacgaacggttgtccgcttcggccacctgaggcacgaactggccgtctttcaggcttgggtggtccgggtagttgagcttcagggtttccaggctggtgctggccagttcgtccaggtgcaggcgctggtaagcctcggtcatcacggccaggccatcacccacggaaggggtttcctggaagttttccacaacatagcggccacggttggctgcggccacgtatgcctgacgggtcaggtagtagtgggccacgtggatctcgtaggacgccagcaggttgcgcaggtagatcatgcgctgcttggcgtcaggcgcgtagcggctgttggggtagcggctggtcaactgggcgaactcgttataggagtcgcgggcagcgcccgggtcacgcttggtcatgtccagcggcaggaagcgcgccagcaggccgacgtcctggtcgaacgaggtcaggcccttcatgtagtaggcgtagtcgacgttcgggtgctgcgggtgcaggcggataaaacgctcggcggcggacttggcggcttccggctcggcgttcttgtagttggcgtagatcagctcgagctgggcctggtcggcataacgcccgaacggatagcgcgactccagggccttcagcttcgctgtggcgctggtgtagctattattgtccaagtctttctgagccagttggtacaactcgacttcgctcaggttttcgtcgacgacttcctttgttgacgagcaagcagcagtcatggcgaggatggcgatcagcagcaggtgtttcacttgcatggcggcttgcgtccctatgacggccgctgtcttgggcggggccgtcctgttatgatgagcgccccgttgaaagcctcggggcaaaagacgccgtatttaaccacaagcgcgcagccgaaaccaaaggctgtgccacgcctagtctgagcatgtccgataaaattgaacttcgcgcagaggtgccgtccgaattgggcggccaacgcctcgatcaagtcgccgcacaattattcgctgagcactcgcgctcgcgcctttccgcctggatcaaagacggccgcctgactgtggatggggcggttatccgcccgcgagacatagtccatggcggtgcgattcttgagctgactgccgagcaggaagcccagggagaatgggtcgcccaggacatcgagttggatatcgtctatgaagacgacgacatcctggtcatcaacaaacccgcaggcctggtggttcacccggccgccgggcacgctgatggcacgttgctcaatgccttgttgcaccatgtgccggacatcatcaatgtcccgcgttgtggcatcgtgcaccgcttggacaaggacaccaccggtctgatggtggtggccaagaccattcaggcgcagacgcagctggttacacagttgcagagccgcagcgtcagccggatctacgaatgcatcgtgattggtgtggtggtagccggcggcaagatcaacgccccgatcggtcgtcacggccagcaacgccagcgcatggcggtgatggaaggtggcaagcaggccgtcagccattaccgagtactcgaacgtttccgctcccacacccacgtgcgggtcaagctcgaaaccggccgtactcaccagattcgcgtgcacatggcacacatcaacttcccgttggtcggtgatccggcctacggcggtcgcttccgcattccaccggcggcgagccagaccatggttgaatcgctgaaaaacttcccgcgccaggcattgcatgcacgcttcctggaactggatcatccgacgagcggtaagcggatgagctgggaatcgcctctgccggacgatctggtctggttgttgacgctgctcaagcaggatcgcgaggcgtttgtcggatgagtgactggctgatacctgactggcccgcgccggctcaggtgaaagcctgcgtcaccactcgagcgggcggcgtcagtctggcgccgttcgacagcttcaacctgggcgatcatgttgaggataatcttgacgcggtcctcgaaaaccgccgccgtcttaccggcgcgttcaatattcagtctgcctggttgcgccaagtccacggggtaactgtggtcgaggctgacccgtcacgcattgccgaagctgatggcagctggaccagcacccctggcatcgcctgcacctcaatgaccgccgattgcctgcccgcgttgttctgcaaccgcgctggcacccgcgtggctgcagcccatgctggctggcgcggcctggcggcgggggtgctggaagcggctttcgaaagcctcggcgccgaacctgaagacgtgctggtctggctcggcccggcgattggcccacaagccttcgaagtcggcccggaagtacgcgaagccttcatgcagccgttgccgctcactgccgaagcgttcgtgccgagccacaacccaggcaagttcatggccgacatctataagctcgcgcgcctgcgcctcgctgcgcgcggcgttaatgctatctatggtggcgggtactgtacggtgaccgacccgcgcttcttttcctaccggcgcagcccccgcaccggacgttttgcctcccttgtgtggcttgaacgctagactcccttgatctgggtcaaacccggtccatatccgccatcgcgtgcttgaatcttccagaatccaccccatctataagggtatctggcaggtttcttcattcaggatgttttatagctccggcctgctcaaaaggaaggtgactaatgcgtattgatcgtttaaccagcaaattacagttggcattgtctgactctcaatccttggcggtgggcctcgaccacccggccatcgagcctgcgcacttgatgcaggcgctcctggaacagcaaggtggttctatcaagcccttgctgatgcaggtgggctttgacgtcaacagcctgcgcaaggaactgagcaaagagctcgaccagctgccgaaaatccaaaacccgaccggcgacgtgaatatgtcccaggacctggcgcgcctgctcaaccaggcggaccgtctggcccagcagaagggcgaccagttcatctccagtgagctggtgctgctcgccgccatggacgagaacagcaagctcggcaagttgttgctcggtcaaggcgtgagcaagaaagccctggaaaacgccatcaacaacctgcgtggcggcgacgcggtgaacgaccccaaccatgaggagtcgcgccaggccctggataaatacaccgtcgacctgaccaagcgcgccgaagagggcaagcttgatccggtgattggccgtgacgatgaaatccgtcgcaccatccaggtcctgcagcgtcgcaccaagaacaacccggtgctcatcggtgagcccggcgtgggtaaaaccgcgattgccgaaggtttggcccagcgcatcatcaatggtgaagtgccggatggccttaaaggcaagcgcctgctgtccctggacatggggtctttgatcgccggtgccaagttccgtggcgagttcgaggagcgcctgaaatccctgcttaatgagctgtcgaagcaggaagggcagatcattctgtttatcgacgaactgcacaccatggtcggcgccggtaaaggcgagggctccatggatgccggcaacatgctcaagccggccctggcgcggggtgagttgcactgcgtcggtgctaccacgctcaacgaatatcgccagtacatagaaaaggacgcggcccttgagcgtcgtttccagaaagtactggtggaagagccgagcgaagaagacaccatcgcaatcctgcgcggcctgaaagagcgttatgaggtccaccacaaggtggcgatcaccgacggtgcgatcattgcggcggccaagttgagccatcgctatatcaccgaccgtcagttgcccgacaaggccattgacctgatcgacgaagcggccagccgcatccgcatggagatcgactccaagccggaagtgctcgatcgcctggatcgacgcctgattcaactgaaagttgagtcccaggccctgaagaaagaagaagacgacgcggcgaagaaacgcctggaaaaactccaggaggaaatcgtccgcctggaacgcgagtattcggacctggaagaaatctggacctcggaaaaagccgaagtgcagggctctgcgcagatccagcaaaagatcgagcagtcgcgccaggaactggaagcggcacgtcgtaaaggcgacctgaaccgcatggccgagttgcagtacggggtgatcccggacctggaacgcagcctgcagatggtcgaccagcatggccacagcgagaaccagctgctgcgcagcaaagtgaccgaggaagaaattgccgaagtcgtctccaagtggaccggcatccccgtgtcgaaaatgctcgaaggcgagcgcgacaagctgctgaagatggaaagcctgttgcaccaacgcgtgatcggccaggaagaggccgtggtggcggtgtccaacgcggtacggcgttcgcgggctgggttgtccgacccgaaccgtccgagtggctcgttcatgttcctcggcccgaccggcgtgggtaagaccgagctgtgcaaggccctggccgagttcctcttcgataccgaagaggccatggtgcggatcgatatgtccgaattcatggagaaacactcggtggctcgcttgatcggtgctccaccaggctacgtgggctacgaggagggcggttacctgaccgaagccgtgcgccgtaagccctactcggtgatcctgctggatgaggtcgagaaggcgcatccggatgtgttcaacatcctgttgcaggtgctggaagacggccgactgacggacagtcacgggcgtaccgtggatttccgtaatacggtgatcgtgatgacctccaacctgggctcggcgcagatccaggagctggtgggtgatcgtgaagcgcaacgtgcggctgtcatggatgcactgacttcgcacttccgcccggaattcatcaaccgggtcgacgaagtggtgatcttcgagccgttggcgcgggatcagatcgcaggcattaccgagatccagctgggtcgcctgcgtggccgtctggcggagcgcgagttgtccctggacctgagccaggaggcgttggacaagctgatcgcggtgggttacgacccggtgtatggcgcacggcctttgaagcgtgcgatccagcgctggatcgagaacccgctggcccagctcatcctgtcgggcagcttcatgccgggcaccagcgtcgaggcgaccgtggaaaacgacgagatcgtcttccactaagcccaaagggcaaagcaaaaatgaaaggccccgcattgcggggccttttttttcgatagggcgttgaactgtaaggcaaaggcttgtaaagtgcgccccgcagcaacgtcagcccacgggtttcttctccccaagaagaaatcagaaacaagcgcaaatcattgtcttaaaagcaatttaaagggttgacaggggtttttaagattgtagaatagcgcgcctcagagacatgaacgtagcgatacgaacaagtcgaagagaaggtagtaagcagtaacgtagtactttgaaatatgtagttccgtgatagctcagtcggtagagcaaatgactgttaatcattgggtcccaggttcgagtcctggtcacggagccaatttcaatatcggggtatagcgcagtccggtagcgcgcctgctttgggagcaggatgtcgggagttcgaatccccctaccccgaccatatttgggtcgttagctcagttggtagagcagttggcttttaaccaattggtcgtaggttcgaatcccacacgacccaccatttttgagaccagttaacactggaatcgaatcttaagatcagaggccaaaagcactgatcgaagaaggcgactgaaaggtcgccttttttttaccggggtatagcgcagtccggtagcgcgcctgctttgggagcaggatgtcaggagttcgaatccccttaccccgaccatattaaaaatcctcgtatcgaaagatacggggattttttttgtgcgtgaaaaactcaagtccggtgaaaatcgaatgtgggagggggcttgcccccgatggcagtgtgtcagtcgacaaatcaatgactgcttcaccgcaatcgggggcaagccccctcccacatttattgagtggcctcaggggccgagttgtcagtgaagtttgagtcgcggctcggtcccacgcccaatcttgctgcccagcatcagcatcgccgtacggaagaacccatacagcgccatctggtgcatgcggtacagcgacacatagaacatccgcgccagccagccttccagcatcacgctgccggtgaggttgcccatcaagttacccaccgccgagaaccgcgacagcgagatcaacgagccgtagtcagtgtatttgtaagaaggcaggtccttgccttcgatacgcagcttcagcgacttggccagcaacgaggcctgctggtgagccgcctgggcccgtggggggacgttgcggtcggtgcccggttgtgggcaggcggcgcagtcgccgaaggcgaagatgttctcgtcgcgggtggtttgcagcgtcggcaatacctgcagttggttgatgcggttggtttccaggccatcgatgtccttgaggaagcccggcgcgcgaatgccggcggcccataccttgaggctggccgggatcacttggccactgctggtgatcagcgcatcggccgtcacttcgctgaccgccgagttggtcagtaccgtcactccaagcttctccagggttttatgcacaggcccgccgatacgctccggcagggccggcagtacacgtgggccggcttcgatcagggtgatgtgcatgttttccggcttgatacggtccaggccataggccgccagctcgtgggcggcgttatgcagctcggcggccagctcgaccccggtagcgccagcgccgacgatggcgacgctgattttttccaccacgtcagtctgcccggcatgggcgcgcaggtagtggttgagcaactgctggtggaagcgttcggcctgcttgcgggtgtcgaggaacaggcagtgctgcgccgcaccttcggtgccgaagtcgttggtggtgctgccgaccgcaatcaccaggctgtcatagcccagcacgcgcgcgggcaccagttcacggccttcttcgtcgagggtggcggccagctggatcttcttctgttcacgatcaagcccgctcatgcgccccagttggaactcgaagtggttccatttggcctgggcgacataattgagttcgtcttccgaagagttcaacgagccggccgccacttcgtgcagcagtggcttccagatatgggtcaggttggtgtccaccagcgtgatgctggcagtgccgcgcttgcctagagtcttacccaggcgggtagccaactccaggccgccggcgccgccgccgacgataataatacgatgggtcatggggatatctcgcaaggctaaaagaaatcggagcagttacccccgcgagcgccaggcagctcatagcgtcaggtaactcaaaaggcgactcagcaagccgaggccgatcaccacggcaagcaccacgccgaggagcagccacggccggaaaggcttgcgctcgactcggttctgggagagttgcaggtactcttcgacatgctgttggtcatcggggttcaggcggctggtcataaaggcctcgtcaggtagacgttgcaaaagggcgccacgttacagtcctggggctcagaggctgatacccacgtcgaacactatgctgcggcccaggttgttgcgcaagaaatccggtgcgtccgggtgggcgaacagcacccgtgcaaaggtcggccctaccagggacaacgagcgccagccctggcgcagatattccgtcggcggcggaaaatggctgttgaggtcgagcacttcgcgcttgaggctagtgaaggcgacgatatccagctcacccaggtccatcccgcgctctttatagttatgcgccttcttgcgcagcgtaggcgccaggcgcatcagaaactcgtgggccgggatgcgtcgcggcttggcttcgcgtcgtaccagttgactgagggagaacgcactgcgccggcgcagcaactcgtcgcgccactcgtcattcaggcgacggccctcgtccagcacgaaaaacacctcgaagctggcgtcgcgaaacagtacgtccggcggctcttgcccggcggcgtggaattcttcggcacggtagggcacgttcaagccttgcagcagacgctggcagacccaacgctcacgctcccatttgcgggcattggacaagaacgcattggcttgttcggccgctacggtgagcaggcgcaagtaatctgagtcatccatagcaagcagcttagcgcccaaatgatgaccgcaggaagtaccccggtgaaacgtcggtgtagactgatcatccgactcttattcgacccggggagtatcgccgtgatcagtgccgccctgttggcgccgacaaccatgggtctcggctggttgctgtatgcgccgctggtactgtgggcgatcctgcgttcgccgtgggtcgagctgttcgccgaccggcgccgtcagcatttgttgttcggcacggtgttcgcgttgttcatgctgtggctggtgcggcgggattttgataccggcgtgtcctaccacttcatcggcatgacggccgtaaccctgttgctggattggcccctggcaatcgtcggcggttttgccgcccagttgggcttgctgctgttggggcgccaggatctcgctgcccttggcctcaatggcctgttgctgatcgggctaccggtgctggtcactgaagcctgcgcgctgctggtcgagcgtgcgcaaccacgcaatccctttgtgtatatcttctgttccggttttttcgcggcagccctgtcggcactgttgtgcctgctgtgtgggctggggctgttgtggttcgacgggcgtttcgccatgccggaatggctggcggattttgtcggctacctgtggctgatcatcttccccgaggcctttatcaacggcatggtcatcagtgccctggtggtgttttgccctgaatggctggagaccttcaaccgcacgcgctacctctcggcgccttggaaggacgacgattcgcagcgttgacctggatcaaatcccgcgtcgacgagcaggcccatgctctgcgaaatttttccgggagcgcggatcatgagtgtgtacgaatgggcacggcaggagttacgcagaagccaggacgcggcacaggagatcggttttgacccaggactgactttgcgcgccatgctcagcgcggtggtgcaacagagcaaaggcgtgcgcagtttcgaagacttggccgacgagctgcaatacctcgcagaaaacctcgacgaccagcaggaatatgcctttatgcgcccttaatggcgcggcggcaggtcttcggaaaacagctcgtcttcggcatccggcgccacggggatcttgtgttcttcagcggcccaggcgcccaggtcgatgagtttgcagcggtccgaacagaacggccggttgaggttggtcgctttccattccacgggtgcgccgcaggttgggcagtcgacggtcaagggttggctcatgatcggcctccacgcaaagtaaggtaaaagtggtgcagtcgctcgacctcgctgtgcagccaggcaaggtcctgatcattgaccagtacgtcatcggcatgtttcaggcggtcttcgcggctcgattgggccttgaggatcgcctgcacctgttgttcgttgatgccgtcgcgctgcagggtacgctgaatctgcagcgattgcggcacatcgatcaccaggatgcgctgggtcatgctgtactggccggactcgatcagcagtggcgacaccaggatcgcgtaaggtgacgtcgcgcgcgccaggtggctgcggatctcctcgccaatcaacgggtgcagcagggcttcgagccagcgccgctcttcgggcacttcaaagatcagcttgcgcaatgcggcgcggtccaactggccgtctggctgcagcacgccggcaccgaaatgctcggcgatgtgcgccaatgctggccgaccaggctctaccacccagcgggcggcgtgatcggcgtccaccaggtcgatacccaggtcgataaagtgctgggccgccgcgcttttgccgctgccgatgccgccggtaaggccgagaatccagggtgttgcaacacgagtggtcatctgaaaccgacagactgcaaatagaagtcggttatttgaccaccccagagcaatgcaatccagccggcaatcgccagatacggaccaaatggcatcggtgccgacgcctgggacttgcgcaggcgcatcaggatcaagccggcgaataccccgaccagtgacgacatcaacagcgtcatcggcaggatctgccagccaccccaggcgcctagcagcgccagcaacttgaagtcgccgtggcccatgccgtccttgccggtgaccagcttgaatagccagaacacgctccacaggctcatgtatccgatcacggcgccccacagggcgtcggccaatgtcgtcagcaggccgaaactgttgacgatcagtcccagccacagcagtggcattaccagcacatccggcagcagttgatggtcggcgtcgatcaggctcatcgccaacaatccccagctcagcaccatcaccgttcccgcctgccagccaaagccgaaatgccaggccacccaggccgagatcaaagcgcatgccagttccgtgagggggtagcggatgctgatcgccccttggcaatgcgcgcagcggccgcgcagaaacaggtagctgagcagcgggatattttcccatgggcgtatgggatggttgcagcgcgggcagcaggagttgggctgcatcaggttgtaggtcggcccggctggttctgcgggcaagtccagcacttcatgggcctgggcgcgccattcccgctcgagcattttcggcaggcgccacaccagcacgttgagaaaactgccgacgatcagccccagcaccgccgccatcgccacaaacgcccagggatgctcccccagcagcaggctcaaaatgcgcttcccagttggaataccggcaggtacatggcaatcaccagcgcgccgacgatgccccccagtaccaccatgatcagaggctccatcaggctggtgaggtgatcgaccagggtgtccacatcggcctcgtaatggttggcgaccttctccagcatgcggtcaagcgtgcccgactcttcgccgatggccgtcatctggatggccatgccgggaaacagaccgctgacggccatcgattgattcagttgcatgccagtggatacatcgtgtcgcatatgctcgattgcctgtctgaacggcccagaaccggcggccccggccaccgagtccagcgcctgcaccaacggaacaccggcggcgaaggtagtggacagcgtgcgggcgtagcgggccacggccgattttctcagcagtttgcctgccaggggcgctttcaacaaaccggcatccagccacagccgaaaagccggtaaggcatggtaggcgtggcgcaacccaaaacctgcggcaagcaggcccagtgccacgccccaccaggctcgctgcatgaactcggacaaagcgatcacctgcaaggtgaagccgggcagtttgccgtcgactccggcgaacaggctttggaactgcggtactacgtggaccagcagcacgccggtgaccaggctggcgaccatcagcacggtgatcggataggtcatggcttttttgatcctggcctttaactgctcgctcttttcccgatgaatcgctacgcgctccagcaaggtttcaagagcaccggcctgttcgccggctgctaccaggttgcaatacaactcatcgaaatagcgtggatgcttgcgcaacgtgtcggcaaggctggtgcctgcggcgatggactgtttcaacccctctgtcagttcacgcagcgtgcggttgtcaaagccttcgccgatgatgtcgaaggcttgcagcagaggaatcccggccttcagcaaggtggccagttggcgcgtgagcagggtgatatccgccgatttgatagatggcttgaggcccgctagaactggagaatgcttgcgtacaagccctgggctgatgccttgccggcgcagctgagccttgaccagggctgggttgtgcccggcgctgtgcccggacaccctgcgccctttgcggttgatgccttcccaggcgtagatcgttgaagcgttgtccatgtcaccgttccgcacagaggtcgttgaagatttatagcttagtcaggtgacggattcgggcaggcgggcggtggtggataaaatgtcagaatgtgcgtcttgtgcgcgattgaccgcctgcggatgagtacactggcgccgctgcacaactcggggcgcaggaagcgccttgtcatgagttctatcctggagagtgaatgtgagacgtcaaaaaggttttaccctgatcgagctgctgattgtcgtggcaatcatcggcattttggccaccatcggcctgcccatgtacaccacccaccaggccaaggccaagttcaccgccggcctggctgaaatcaccgcgttgaagcccgggtatgaagacaccctcaaccaggggaccgtgccgaccttggcattgatcggcggcaccagccccaccgccaattgcaagatcgaagtggcaggcgatgtgaccaccggcgcgggcaccatcagttgcgaaatactcgacgcacctgcgccggtgctgggcaagaccatcagcctgacgcgcaacgccaccaccggttggaaatgcagcaccaccgctgaagccaaatatgttgccaagggctgcggcgccgacggggcatagctgctaaaccaaccacaggtaacttgaggtggccgatggcgttatccatacagcagcgtggcagtgttttcctggtgacagtggtgtgcctgctggtagtcggaatatgtgcacccttcagtgggcatgatctgcagcgggctatgcagattgccatcggggcgtgtgcggtgctgtatgggttatctgtcgtccctgtcggccaattgctggacaggccaaccgccctgggcctgatgctgattatcgtgcttggcctggtgtcttccacgttggcccatcagccgctctgggcactggccgaaatggcgctgtttgtcagttgcgggtcgattgccgtggcatttgccttgctgcgtcgtcatggcggcgagcctttggatcgcgccttggtcatggtggtggtgctgctgtgcctgatcaagtcgattcaatacctgtatgcgggcgcacttgtgttcatcaacgctgaacgtgtgctggaccctgacctgttgctgtccggtttttccaacaagcgcttctacggccagtttcagacattcacgctgccgttgctggcacttcctttgttaatcactgttacctctcgctcgctcaaaggcgcggtgtttgcgttgctgtgcgtgtggtggatgattgcgatcgccggtggtacgcgcggtacctggcttggcatgtgtgtggccggggctgtgctggcggtacttggcccctgggggcgacgatggctgggttggcaactggcggcagtgtttggcgggctgctgctgtactggctggtgtttgcgttaggggcggattacctggaagtcgaggtctccaagggcgccagtgaccgcctcaccaccaccctgtcgggtcgtggtccgatctggtggcaggcttggcatatgctcatcgagcgtccatggttgggcttcgggccgatgcattttgccgatattgccaatgaaatcgccgctcacccgcaccaggccatcctgcaatgggccagtgaatggggtgtgccatcggccttgtgcgtgatggctctggcgtggcgaggcggctgggcgacgttcggtgtgttgcgcgaacgagcgctctcgaacactcgcgctgatctgttgcggctatgcctgtttgcggccttggtaggggcgttggtgcagtccatggtcgacggtgtgatggtgatgcccaattcccaggtctggctggcgctggtggtgggctggctgatggcgttgcatgtgtggaaaaccccggaggccgccgcgttgccattggcctgggcagcctggaaagtgctgagtgtgctggccgtcggtctgctggtttttatcgcagctcgcgatgtgcctcacatcaagcaagcccagcagcagtacctgagcactcatgtcggcctgctgcaaccccgtttctgggcccagggcgtgattgcgcgctgaaggccgcaagttgccggacttccaatgcagtgctagctttagcccaccgcccgtgtagctcagccggtagagcagcgcactcgtaacgcgaaggtcgcaggttcgattcctgtctcgggcaaaaaggcaccatggcaacaccgttttcagatgatcccagaatggttctgaaggccagacgagccggcatttgagcctgctcttttgtatctgcgcaaccttgatgacccagatgcatccccattcctcgatctaagagaacaacatgaccacgactgaaatgacccaggaagttcggcatcaagcagccctcgaaaaatacctcgaggaatcgccgcagcttaaagaagagatcaaggacctgagcgccgatgatcagcgcgaccagattcagtgggcattcgaggacgaagccgagagccagggctatcagccttgggagctgaccctcaagtacacctcgacaccggaagaattcgaagcggcacgactggccttgcacaaagaggcggccgaagtgctgggtgtcgaatgggaagagtactgcgagatgaatgacctggtagtttagaagcagctgccagactcaagctgcaagctgcaagctgcaagttgtctcgcgtccctcttgcagcttgaagcctaatacttgcagctccttagatactcaggcgcatcgacaaatccaccgccttcacatccttggtcatcgcaccaatcgagatgtagtccaccccggtctcagcgatcggcaacagggtgttttcgttgatcccgccgctggcttccagcttggccttgccgccattgaggcgcacggcttcacgcatgtcttccaggctcaactcatccagcatgacgatgtccgcgtcagcggccagggcttcgcgcagttcatccagactttccacttcgatttccaccggcttgccgggagcaatccggtgcgcggccgcaatcgcctgggcaatgccaccgctggcagcaatatggttttccttgatcaggaacgcgtcatacaaaccgatacggtggttgtgacagccgccgcaggtcactgcgtacttctgcgccaggcgcaggcccggcagggttttgcgggtatccagcagcttgacctgggtgctggaaacaaagtccgccagaaattgggcacgcgtggcgacgccggacagcagttgcaggaaattcagtgcgcagcgttcgccgctgagcagcgagcgcgccgggccttcaaggtgaaatagcacttggttggggctgacacgttcaccatcggccacttgccaatgcacggcgacccgtgggtccagctggcggaacaccgcatccacccaggcggtgccggcgatcactgctgcatcgcgggtgatgatggtggccgtggccagccgttcggccgggatcaactgcgcagtgatgtcgccgctgccgatgtcttccagcagtgcgcggcgcacgttggcttcgatttcggcggtgaggtcggcaagacggagattcggcataacaggctccacagacaaagtgccccgattataggggcagtgcgcgtctgaacccagcgacctgctcatttaccgccaaatgacagagtgtgctggcgcaaacccccttgtttgcaagataatctcgcgccttgcaattggcgtcatagctttgacgtctcgctaaataccgccgtttcaggaggccaggatgcacaatgacggaaaggtggtgccaatcaagaaggcgcatgccacgccatcgccgctcgcccgactgccggtggtgttgctgcaggttcgcgacagagcggcgcaacagttgcagcaagggttgcaggaactgttcgataacgccgacgacacgctgttcgaaatggccgacaaggcgcgcaacaatcttgaccaccacattttctttgaagccatgcgtgatctgcgcctcaagcgcaagaatttcgagcgtgtgttcatggagcgtcttttcgacgcctttgccagtctgggccaggcagggcggggcgagctgcaactggtgccggtggtttcctacgacggggtgccgggttcaaccagggacgacctggaaaaagccgtggcgcttgaagccatgctgggtcgcgtgcgccaccgtgacggcctggctctcgcgcaacttacggcacgcttgagcgccttactgggcaaccgcctggatgatcgtgagaaccctctggggccggcgctgctgtgtgagtttttcctgcgggcggggcgcagcctgggcgtggagatccgcgtcaaactggtcatgctcaagctctttgaaaaatatgtgctcagtgacgccgaccagctatacggcgaagcgaatcaattgctggtcgcaaccggcgtcttgcctgaactcaagaccataccgtcccgacgcatcgatggacgtgtggcacctgagcatccgcgcgaagctacttcgccagtccccgaccggtccggtgacgaaaatggccaggaagccttcgccgcgcttcaaccgctgctcacggcggtgcgtggcagcgtggcgccgacgcttgaggccagcgccgagccgttgcctatttccacccaggacctgctgcgcctgctctcccatttgcagcagtacgtgccggagcctgagtcggaggacgatttcgacctgcgcagccagcttgaacagttgctcacccgtgtcagcgtcaagagtggtaagtcgcgggtggtggaggacgcggacgaagacgtgatcaatctggtcgcgctgctgtttgagttcatcctcaatgaccgtagcgtgcccgatgccttcaaggccttgatcggccgcttgcagattcccctgctgaaagtggcgttgctggacaagagtgttttcagtcgcagtggccacccggcgcgggggctgctcaatgaaatctcggccgccgccatgggctgcagcccgctggatgactaccaacgcgaccatctttacctgcgcatcgagcaggtggtgcagcgcttgctcaacgaatatgtcgaagatccggcgatcttttcccagttgctcgccgagttcagcgcgtttaccgccgacgagcggcggcgcagcgacttgctcgaacaacacacccgggatgccgaagccgggcgcgtgcgcactgaagccgcccgccagcgcgtggccgatgtgctgaataaacggctgttgggcaaagtcctgccgcgtcctgtggtgcagttcctgcaacaggcctggagccaagtgttgctgttggcgagcctcaagcacggcgagcagtcagtgcaatggcaagcggggctgcgcaccatggacgaactgatctggagcgtcggcctgcagcaggacaccgaggccgggcggcgtttgctggaccagctaccaggcttgctcaaggccttgcgcgacggcttgaccagtgccgcgttcgaccccttcagcacccgcgaattttttgtgcgcttgcaggcgttgcatatccaggcgcctgaaggtgttgatgagctgatcgaggtgcgtgagccatttgtgctgagtacggcgtcacccgacccggtcaccgagctgtcgggtaacgaccctgacctgtacaaggctctccaacttaaagtgggcgactgggtagtattccaggaaggccaggccagcacgctgcgctgcaagctgacagcgatcatggcgccggccaacacttatgtgttcatcagccgcacggggctcaaggtattggagaagagtgccggtcaattggcaatggcgttcaagtgtggcgcactgcaaacgctggaagacgggccattgttcgagcgtgccctgacggccgtggtgggcaaactgcatcaactcaatcgcggcaagtgatcgcaaccggagggtcgaacgcggcatactggtcacactttgtattgttcaaggaacctgtatgcagttggaccccaccagcggttggtgccggggcatccatcattgcccttcgcccaacttcaacgagcgccccgccggcgaaatctcactgttggtggtgcataacatcagcctgccaccggcgcagttcgccactggcaaagtgcaggaatttttccagaaccgcctggatgtcacggaacatccctactttgaagggattgccgacctacgggtatctgcgcattttctgattgagcgtgatggcgcggtgacgcagtttgtgtcctgcatcgaccgtgcctggcacgccggggtgtcgtatttcgaggggcgcgacacctgcaatgatttttccgtcgggatagagctggagggcacggatgacctgccgttcaccgacgctcaatatgcagcactgatcgacctgacccgccagttgctggtggcttacccaagcatcaccccccagcgcatttgtggccacagcgatatcgctccgggacgcaagaccgaccccggccccgcttttgattggacgcgctttcgcagcgccctgcaggatggagaacacgcacgatgagtttcctggtgttggtgctggctgtatggatcgagaagttttcggccctgcgccagcggttgcagcgagatggcggttggttgcgcgaactggccaagctggaatcgagcccgcgcatgggcaagcagccctggctgattctgacgttgctggtgttgttgccggtggccttgctggcgctgttgctgctggtgctggagccggtggcgtacggactgctggcgctaccggtgcacctgctggtggtgatctacagcctggggcgtggtgacctgctcgctgggctaggtccgttccgcgatgcctggcgacgcggtgacctgcaggccgccgagcatgtggccgaacgtgacctgagcctgagcgccgacagtggcgagcaattgctcgaacgcgttcagggccatctgttgtggcaggcctaccagagcttttttgcggtgattttctggtacttcctgctgggcccggttgccgctctggcttatcggctgctcgcactggccagtgagcacagcaagaaccccttggtggccgagcgggccgggcaactgcgccacgcgttcgattggctgccggttcgcctgctggcggccagctttgcgctggtcggcaatttcgttgccgtcagccgtgtgatgctccatgagctgctgagctgggacatcagcgccgcccagctggtggaaaaagtcggcctggtcgccgccgaaatcccaccccctgcggtcggccccgatggcatcaacagcctcgaccgactctgggaactgctgctgcgcgcagcggtgttgtggtacgccggcttcgccatctggaccgtcctaccctgaccctgtagaagccggctcgccgtagtgagcagtcttgcctgtggcgagcgggcttgccccgcgctgggctgcgaagcagccccccccatccattaaccttaagttacaaaactccctttcaaattgagctatacagatgctggctaactgccgccctgcacctcaataaaaataaaagaaagggagttcacctgtgaagagcttgctctatcccgccgtcgccctgatgaatcgcctgagcttcggcatgaagttcagcctgatcagtgtgttgttcctgctgccgatgctggcgaccaactcttatctggtgcgtgactcgtggcgtgaattccaaggcacccgcgtggaactgcaaagcctcgatttacttggcagcagcctgaccctgcgccgcgacctggaaaccctcaacaaccaggtgcagatcaacgccaccctcggccagtccggcaaggccggcgatcttgaaggcaagatcagcgccctggaacaaagcgtgctcaaccgcctgcaaggtctcaacgccatggctaccgagcctgagcagattgcggtttttgatgctaagcgtgaggagttgatcgcagccttcaagacccagcaacaggaaacgtcgctgctgagcaaaagcgcgctgatcggcaagttgctcaacaaatcgcagatgctcagccagatcatcgccagccaatccgggctgagccgcgactcccagagcgacctgcgccaactcagcgagctgatcaccagcgtcaccccgcaagtcacccaggccctgggccaaggccgggcgatgggtgcgtattccctgggccagggctttctcaattcttcgtccagcacgcggtttgacgagcttttgcagcaactggaaaaactccaggccgaatatggcctgaagttgcaggatgccctgggctccagcaccgcagcccacgcggcactcgacaacctggccaaagccagcaacgccagcctcaagcatggcagtgagttgtttgaggagcaggtggtgatggccgagaccctcgacgcaccctggcagggtttttacgacagcgtcagccagttgatggcccagacctatcagttggatgacgcgaccctggcgttcctcgggcagcagttggagcaacgcctggcgcaaaaccgcacgcacatggtggtactggtctcggccctgagcgcggtgtttttgttgatcttctatttgtacgccggtttctacgcgtccacccgcaccacgctgcgacgcctgggcgcgatgatggacaaggtggcagccggcgacatgaccgtcacttttgttgcacatagtcgcgacgagttgggcgacctgggccaggtgttcaacggcaccgtggcgaagatccatgacctgatcgagcgcgtcgggcacaccgtcagccaggtcgagctccaggccggccaggtggaaacagtctcggcccaaagcaaccaggccgtgtccgggcagcgtagtcagatcgagcaggtggccacggccatgaaccagatgtcgtccaccgcccaggaagttgcgcgcagtgcggcggcggccgtcagcagtgcccacagcgtcaatgacgaaactgtcagcggccgtggcctggtgcaatcccagcagggcagcattgcgcggctggcttcggaaatcgatcagtcggtgcaggttatcaaccaattggctaccgacagccagtccatcagcagcgtcctggaggtgatcaaaagcattgccgagcaaaccaacctgctggcactcaatgccgccatcgaagccgcgcgggccggtgaacaggggcgtggttttgcggtggtggccgacgaagtgcgcactctggcccggcgtactcagcattccaccgaagaaatcgaacagatgatcagccgcctgcacagcggtgtggccgccgccgtgaaggccatgggtaccagccatgccatggccaatggcacggtagggcaatcggaaaaggtccagcaggccttggaaaatattctcggtgccgtgggaatgatcgtcgaccagaaccagcagatcgctgccgccgtggagcaacagaccgccgttgcccatgacattgaccagaacatcgtcgaaatcaatcgcgccggcgagcatgcggcccagggcgcccaccagaccgaagcggcgagccggcagctgtcgatgcaggtgattgagttgaggcaattgatcggcgcgtttcgagtgtaggaattgtaggtagggcgtattgcttacgggtgtagtgcttgtcctgatttccctgcgtgtcttttctggcggcgtgaatgggtgagaatttgtttcagacaaattcacgttcaggggagcacgacgatgaccattgcagtcggcatcaaagggcattgcgcccattgtgatatcaggtttgagctcaagccctggcagctgaatgccatcgccatcgaagagcccttcgattgcccgtattgccggcagttcttgcaattgagttgccctcggcaattgcgggcgttcaagctgttgggccattgggcgctggtgcagccgagcatggcggtgttcacctgcatggtgctgatcgtggccctggtcacggaatgggtggggctgatcacggtgatcgggcagttcaacgtgtcactggtggtgctgctggtgcatttcctggcgctgcgctatgcccgttaccggcagcggatcacgttggacctgcaagtggtcacgccagtcttaccaattgaacagctcgcacgcattgcgtgtgctcgcctcagccaacgatagcgcgctgatgcccatgcgctcggccagggcggtgcagatggccggcaggtgttcggggctgttgcgttggccggggaacatggccggcgccatatccggtgagtcggtttccagcaccaccgattccagcggcagttgcgccagcaccttgtgcatgcgcaaggcctggggccaggtgggggcgccgcccaaccccagtttgaagccgagcttgatgtactcccgagcctcttcgtggctgccggcaaacgcatggatgatgccgccgcggggcaggcggatgcgcttgagggtggcgatcacggcggcgtggctgcggcgcacgtgcagcaacgccggcagttggaactccacggccagtttgagctgggcttcaaacaggctttgctggcgttcgcggtccagctgttcgagaaagtaatccaggccgatctcgcccactgcacacagttgcccgtggccgtgcaggcgcgtcaaccaatcgcccaacgccgtcaggtcagcggggcgatggtcgtcgaggtacaccgggtgcaggccaaaggcggcgaacaaaccttcgtccgcttgcaccaggtcccacagcctttgccaattctgctgatacacccccaacaccaccatgcgccgcacgcccagcgctcggctgtgggcgaggacttcccggcgatcgctgtcgaaatccgggaagtccaggtgcgtatgggtgtcgatcaactccacgctcaagcctcgtgaatacgctgcttgaacgtccggccgatggcatgcaccccaggttggtactgttcttcttcgatcgcggccagcgccaggcgcagggcggtatcggcgatcagttggtgctgctgggccatggcgttgaccggcagcggcaggaagtccagcaattgggtatcaccaaaggtgcccaggcgcagcgggcgcgtcttgagcgggaagtcatgcagcgcgtcgaacacgccttgcagcagcacgtaggacgtggtcaccagcgcgtcaggcaaatgccccagttgctgtagaagttgctccatcagctgtcggccgcagtcgcgactgaacgcttccgcgtgttcgacgatcacctcgccgctgaacccggcaagggcttcacggaaaccggcggcgcgttcctggctgatgctcaattcgggccgtgcgccgatcagcacaatctgcttgggcagcggttgcagcaggctgctggtcaactgctggcaggcctggcggtcatcgctgaccaccgaacagaactgatccgcacccatcacccggtcgatggcaatcaccggcaaccccttggcttgcagctcgcgataactgtcatcgctggcgggcaggcaactggcgacgaacagcgcatcacaacgccgcgcgcggaacagctgcagcaactggcgttcgctgtcggcgtcatcgtcggagctggcgatcagcaactgatagccgcgcgcccgtgcgccttgctccaggagcttggcgatacgtgcgtaactggggttttccagatcgggcaggatgaagcccaaggtgcgcgtgtgccgactgcgcagcccggcggcctgtgggttgggggtaaagccatgggcttcgacgacagcccgcacccgttcgacggtggcgttgctgatgcgctgctgttcggccttgccattgatgacgtagctggcggtggttacggacacaccggccaggcgggcgatatcactgagtttcaaaccgggatttccttgttttctggagcttgccccgacattttgtccaatcgtaaccgattccagcactcgaccaatgtctcagctcaagtgccgagtggttgttcaaggatgcgcaattaacgcgtaatctgccataaattctagattaaacgtttcagccagcgtatttttacgacgttcgcgactgagtagctactgccaactgactgctcagtcagctattgatgcacacccattacactgtttgtttaaaacaatacctagtgcggtcaccgcactaactaggagaacggcatgcttgagctcactgtagagcagatttccatgggccaggtggctgtggataaatctgctgccttgcacctgctcgctgacaaactggtggccgacggcctggtcgccgagggttatctcagtggcttgcaggcccgtgaagcccaaggctcgacctttctcggccaaggtattgccatccctcacggcaccccggaaacccgcgaccaggtgttctccaccggcgtgcgcctgctgcagttccctgaaggggtggactggggcgacggccagatcgtgtacctggccattggcattgccgccaaatccgacgaacacctgcgcctgttgcaactgctcacccgtgcccttggcgaaaccgacctgggccaggcattgcgccgtgccggaagcgccgaagtcctgctgaaactgctgcaaggcgcaccgcaggaactggcgctggatgcgcagatgatcagcctgggtgtgtccgccgacgacttcgaagagttggtctggcgcggcgcacgcctgttgcgccaggccgattgtgtgagcaatggtttcgccgccgtgttgcagcaggtcgacgcgttgcccctgggcgatggcctgtggtggttgcacagcgaacagaccgtcaagcgcccgggcctggcgttcgtcaccccggacaaacccatgcgttacctcggccagccgctccatggcctgttctgcctggccagtctcggcgaagcccaccaaacgctgttggagcgcctgtgcgccttgctcatcgaaggtcgcggccaggaactgggccgtgccaccagcagccgcgcggtgctcgaagtgcttggcggcgaactgcccccggactggcccagcgctcgcatcaccctggccaacgcccacggtttgcacgcgcgcccggcgaagatcctcgcgcagttggcgaaaagttttgatggcgacatccgcgtacgcatcgtcgatggcccggtcggcgccgtgtcggtgaaaagcctgagcaaactgctgagcctcggcgcacggcgtggccaggtgctggagttcgtcgccgagccgacgattgccggcgatgcgctgcccgcgttgctcgccgctgtgggggaaggcctcggtgaagaggtcgagccgctaccgacggtcagcgcccaacccgccgccctggatatcgagccggttgtcagtgcgccgaccagcggcagccagatccaggccattgccgctgcaccaggcatcgccatcggcccggcacatatccagatccagcaaacgttcgactatcctctgcgcggcgagtcctccgcgatcgagcgccaacgcctgcacagcgccctcggcgaagtgcgccgcgacatccagggcctgatcgagcgcagcccatccaaagcgatccgcgagattttcatcacccaccaggagatgctcgacgacccggaactcaccgacgaagtcgacactcgcctcaagcagggcgaaagcgccgaagcggcgtggatgagtgtgatcgaggcggccgccaggcagcaggagtcgttgcaggacgccttgctcgccgagcgcgccgccgacctgcgtgacatcggccgccgtgtattggcgcaactgtgcggcgtcgaaaccgtccaggagccgagccagccctacatcttggtaatggacgaggtcgggccgtcggacgtggcacgtcttgaccccgcgcgcgtcgctggcatcctcaccgcccgtggcggcgcgacggcccacagcgccatcgtcgcccgtgccctgggtatcccggcgctggtcggcgcgggcccggcggtattgctgctggcctccggcacccccctgttgctggatggccagcgcggtcgcctgcatgtcgaccccgacgccgccaccctgcaacgcgccacggtcgagcgcgacacccgcgaacaacgcctgcaagccgcttcggcgcaacgccacgaaccggcgctgacccgcgacggccatgccgtggaagtgttcgccaacatcggcgaaagcgccggtgtcgccggcgcggtggagcagggcgccgaaggcatcggcctgctgcgcaccgaactgattttcatggcccacccgcaagcgccggacgaagccacccaggaagccgaataccgccgcgtgctcgacggtcttggcggtcgcccgctggtagtgcgtactctcgatgtgggcggcgacaaaccgttgccgtattggccgattgccgaggaagaaaaccccttccttggcgtgcgcggcatccgtctcaccctgcaacgcccgcagatcatggaagcacaattgcgcgcgctgttacggtccgccgatagccgcccgctgcgcatcatgttccccatggtcggcagcgtcgacgaatggcgtgccgcccgtgatatgaccgagcgcctgcgcctggaaatcccggtggcggacctgcaactggggatcatgatcgaagtgccgtcggcggccttgctcgcaccggtactggccaaggaagtggactttttcagcgtcggcaccaacgacctgacccagtacaccctggccatcgaccgcggtcaccccaccttgtccgcccaggccgatggcctgcacccggcggtactgcaactgatcgacatcaccgtgcgcgccgcccatgcccatggcaaatgggtgggggtgtgcggcgaattggcagcagacccgctggcggtgccggtgctgatcggcctgggtgtggatgagttgagcgtgtcggcccgcagcattcccgaggtgaaggcgcgggtgcgtgaattcagtctgagcgaggcccagggcctggcgcaacaagcactggcggtgggctcgcccgccgaagtgcgtgccctagtggaggccgtgtagatggcaaggattctgaccctgacgctgaacccggcgttggacctgacggtgcgcctggcgcacctggaaccgggtgaagtgaaccgcagcgaaaccctgctgacccatgcagccggcaagggtgtgaatgtggcgcaggtgctggcggatttgggccatcaggtgagcgtgggcggtttcctcggcgaggcaaacccccaggccttcgagacactgatcgcccgccgtgggtttggtgacgcgttcattcgcgtgccgggcgaaacccgcagcaatatcaagattgccgaacaggacggccgggtcaccgatatcaatgcgccggggccgcaggtcagtgacgcggcacaagccgcgctgctcaagcgcatcgccgacatcggcgtgcaattcgatgcggtggtggtcgccggcagtttgccgcgtggcatcagcccgcagtggttccaggggctgttgcagcaactgaaaaacctcgggttgaaagtcgccctggacaccagcggcgaagcgctgcgcgccggtttgaaagcggggccgtggatggtcaagcccaacaccgaagagctggccgatgccctggggcatgccccggatgcaatcagccaactgcatcggcaaggcgtggaacatgtggtggtttccgatggcgctgccggcgtcacctggtatcgcccaggcgcggcgctgcaggccacgccgccaaaggtgatggtggccagtaccgtcggtgccggcgactcgctgctggccggcatgctgcacggtctgctcagtggcgatacgccggagcagaccctgcgccgcgctacggcgattgccgcgatggcagtgacgcagatcggttttggcatcagcgatgacgcgcagttggcgcgcctcgaaagcggcgtccacgtacgcacgctgacagaacaataagagggtttgtgatgaagttagccattgttactgcctgcccgaacggcatggtcaccagtgtgctgtgcgcccgcttgttggacgccgccgcgcagcgccagggctggagtaccagcgtcgaagtggtggatgtacagcgcccggagcgccaattgtcccaggcggtcatcgacgacgccgaatgggtgttgctggtcagcagcaccccggtggacatgcagcgctttgtcggcaagcgcgtgttcgagagcacaccggcccaggcgttggcggacgtcgacgccgtattgcgccgtggcaccgaagaggcgcaggtgtatgtcgcggctgaggcgccggccaggaacgcgccgcgcatcgtcgcgatcaccgcctgcccgaccggcgtcgcccataccttcatggccgccgaagcgttgcagcagacggccaagcgcctgggctatgacttgcaggtcgagacccagggttcggtcggcgcgcgcacgccattgagcgccgaagcgatcgccaatgccgacgtggtgttgctggccgccgatatcgaagtcgccaccgagcgcttcgccggcaagaagatctaccgatgtggcaccggcattgccctcaagcagtccgaagccaccctcaacaaggcccttgccgaaggtgcggtggaaagcgcggccagcggcgcggtgaccaagccggaaaaaaccggcgtgtacaaacacctgcttaccggtgtgtcgttcatgttgccgatggtggtggcaggcgggttgttgatcgccttgtcgttcgtgttcggtatccacgcctttgaacaggaaggcaccctggcggctgcgctgaaaaccgtcggcgaccgcgccttcatgctgatggtgccgctgctggcgggctacatcgcctactcgattgccgaccgtccgggcatcgcgccgggcatgattggcggcctgctggccggcaccctgggtgcaggttttatcggcggcatcttcgccggtttcctcgccggctactgcgtcaagttgatcacccgtgcggtgaagttgccgcagagcctggaggcgctcaagccgatcctgatcatcccgttgctggcgagcttgttcaccggcctggcgatgatctacctggtggggccgccggtcgcgcgcatgctggtggggctgactgattttctcagcaccatgggcacgaccaatgcggtactgctgggcatcctgctgggcggcatgatgtgtgtcgacctcggtggaccgatcaacaaggcggcctacgcattttctgtcggcctgctggcggcccacagcggcgcgccgatggccgcgaccatggcggccggcatggtgccgccgatcggcatgggtatcgcgaccttcctggcgcgccgcaagtttgcccagaccgagcgcgaagcgggcaaggcggcgatgatcctcggcttgtgcttcatctctgaaggcgcgatcccgtttgccgcgaaagacccgttgcgcgtgatcccgtccagtatcgccggcggtgcattgaccggtgccctgtccatgtacttcggctgcgtgctcgccgcgccccatggtggcctgtttgtgctggtgatcccgaatgcgatgaaccatgcgctgctgtacctgctggcaattgtcgccggcagcctgctgaccggcctggtctacgcgttgatcaaacgccccgaagcgcaagaactgactgtgacggtctgacgcggtgcagaaaatgtgggagggggcttgcccccgatagcggtgggtcagccataaatgtgctggctgacactctgccatcgggggcaagccccctcccaccgttgatcgctgtataggcgtcatctctgcttcatcggggcgtgctttagtggcccttttgatactcaagagggcacctgcatgagccacttcgatctcggccgccgccgcgtgatgcaagccgtcggcgccggcctgttgttgccgggcctggctccggcggtgatcgcttcggtcaaggaccggccgcagctcaccgatggcgtgcagtccggcgacctgctcggcgaccgcgccatgatctggagccgcagcgaccgcccggccaggatggtggtggagtgggacacccgcagtgtgttcagcaaccctcgtcggtttatatctccgctggccgaccagcgcagcgacttcaccgcccgcgtcgagctcaccgggctgcccgtcgaccaggcgatcttctaccgcgtgcacttcgaggatgcccagaccggcatcgccagcgagccgtggttcggccatctgcgtagcgtgccgcaacagcgccgcgacattcgttttgtgtggagcggcgacaccgtcggccaaggcttcggcatcaacccggacatcggcggcatgcgcatttacgaagccatgcgcctgcgcttgccggacttttttatccacagcggcgacaccatctacgccgacggccccgtgcccgcgcagctcaccgtcgaagacgggcgcatctggcgcaatatcaccactgaggccaagagcaaagtcgccgaaaccctcgacgaatatcgtggtaattaccgctacaacctgatggatgaaaacgtgcgccgcttcaacgccgaggtgccgcagatctggcagtgggacgatcatgaagtggtgaacaactggtcgccgagcaagcagttggatgagcgctatcgggtcaaggacatcaataccctggtcggccgtgcgcgccaggcctggctggaatactcaccgatgcgccggcaggcggcggacggcggcgggcggatctatcgcaagctcagctatggtccgctgctggatgtattcgtgctggacatgcgcagttatcgcgggcccaacgatgacaacctcggcggcgcaaaacccttcctcgggcgtgagcaattggactggctcaagcgtgaactcaagggctcccaggcgcagtggaaagtcatcgctgccgacatgcccatcggcctcggcgtacccgacggtgaagtcagccctggcgtaccgcgttgggaagccatcgccaacaacgagcctggtgcgccgcaaggccgcgaattggaaatcgccgagctgctgggctttttaagggcacaaaacgtgcgcaaccacgtgtggctgaccgctgatgtgcactactgcgcagcgcaccactaccacccggatcgggcggcgttccaggatttcgaaccgttctgggagtttgtcgccgggccgttgaacgcggggagtttcgggcctaatccgctggacaagacctttggccccgaagtggtgttcgagaaggcaccgccggcgcagaacacctcgccgctggcggggtttcagttttttggggaggtgaacattgatgggcagacggcggagttgactgtggtgctacgggacctggatggcgtctcggtgttcgaacaaaaactccagcccacctgaattggaacgctttgaaaactgtgggagggggcttgcccccgatgagggcgtatcagtctctgactgagctattgatacaccgctatcgggggcaagccccctcccacaggttgagtgttgttcgttcagggggtcagtacacatctcggcgatagcggccctgctcgatcaaccgctccacggcctcactgccgaggatgtccaccagcgtctgatccacccccgtggccatcccctgcaaactcccgcacacataaatcgccgcaccatcggccagccatttgcgcagcacatccgctgactcgcgcaggcggtcctgtacgtagatcttctcctcctgatcgcgggaaaacgccaggtcgagcaacgccagatcgccgctggccaaccagccttgcagttcgtcctggcagaggaagtcatgcttgatattgcgctcgccaaacagcaaccagttgcgctgctggccgtcggcgatacgtgccttgagcaaactgcgcaggcccgccaggccggtgccgttgcccagcaggatcagtggtaccggcgcctgcggcaggtggaacgcgctgttgcggcgcaggcgcaggctgatgttcgagccgagggcggcgtattcggtcagccagcctgagcccaggcccaggctgccatcggggtggcgttcctggcgcacgatcagttccagcacgccatcgctggcaatcgaggcgatggagtattcgcgcatgcccagcggcaccaacgcgtccaccagtgcctgggcgtgcaggccgaccaggtgtgcgcgatgggtcggcagttggcgagtggccagagcctggtcgagcgtatgcgccatgccgtcgatcaacacgccgtcgctgccggccaggcccaagccttcgaggaagtgttcgatggcccaggggcaattgcgcggcagcacttccaccaggtcgccggcttgccagctttgtggcgacggcgaggtgaggcccagcagatagacgtccgagccgctgctgtcgcggttgagcaatgagcgctggctgagcgtccagttttcatactgggcggtcggccacgcggatgcgggggcatggccggtcagttggccgagttgctgctgccagtgaagcagggcggtggtgtcgccgctgtcgacttccacgggcgcaaacagtgggttgccgccctggtttgtcagccagaaatgcaggcggcgggcaaagccgcagaaatgttcgtactggcgatcacccagggccagcaccgagtagttcaggcccttgagggacaggtcctggccgagcacgctgcgctcgaaaccacgggcactgtcgggggcttcgccgtcgccgaaggtgctgactacaaacagcgcgttttccgactggcgcaggtcgtcctggctgacgctgcccaggggctgcaccttcaccggcaggccggccgcctgtaattgccccgccgtttgccaggcaagctgttcggcaaagccgctctggctggcaaagccgatcagccacgcaggggcatcgctgtggttggcggtgaggccgttgcgcgcgtcacgcacctggcgttttttgcgccggcggtccaggtacagcagccagccggtgatgaagaacaatggcatcagcaccgagctgagtgtgaggacaatccgcccgatcaaaccgaagtagctgccggtgtgcagcgcatagacgctggtcagcagtctggaaccgaggcttttgctggcgtactgatcgtgggacttgatctcgccagtggccgggtcgaggttgatctggttcagtgcccggtcatggggcgagtttttcagcaggtaatagacggtagccggctgcccggcgaccgctggcatgcggatgttataggcgctcaaacctgggccggcgttgctgtagatgctgctccagatcgcgtcgtagttggccaccggtgccgcaccctcgggcgccgggccgcgcttgcgcacccgttcgttttgcggggcgtcggacagcagtctggtcaggccctggctgtaccagtcgtaggaccaatacaagccggtcagcgccgacagcaggtaggccagcaggcaccaggtgccgaacaccgagtgcaggtcccagttgaaggcccggccttttttgcgccagtccagcgtcagccaggcgcgccagctcgccacctggcgcggccagcgcaggtacaggccggacaggcagaagaacaccaggatcagtgtgcatgcgccggtgatgttgcgcccggtgtcacccatcaccaggaaacggtggaactgcagcaggaagccaaagaggtcctgaccgaccacatcacccatgtagtcgccggtgtagggatcgaaatagcgcaactggccacggcgctcgccgggtggcggcgtgaagaacacgcgggcggcgttgccgctctcactttccacgaacagcatggccacggtctggccttcggtggcctccagcttgcgcaccagctcggcgggcggcagtacgccggcttcgcgtttttccacggtcagtacgctggggttgagcgcccgcagtatttcatcctgaaacgagaccgcagccccgctgatccccatcaaggccagcaccagcccggctgtaatgccgaagaaccagtgcaactggaacagggttttcttcaacacgtctgaccgcctcgtctatccggatatgtagggcacggcgcgcattatgccgtggcttgtcgagaaacattctgttttacacgcaaaagccccacgcatccgatgcgtggggctctttgctgcgtggtgctgctgtttagaagtggaagctggtggtcaacaaggccgtacgaccggccgcctggttggcgaagtgggtggagaaggctttgtcgtaatacagcttgtccgtcaggttctgcacgttcaattgcaggtcgacgttcttggtcagcttgtaactggccatggcgtcgtagcgggtgtaagacggtacgtaaacggtgttgcccgcatcgccataaacctggtcgacgtagaacgcgccgccgccgatggtgagcttggaggtgacgtcgtaggtggtccacaggctgaaggtgttcttcggcgtgttgggcatttggttgcctttgttggagcccgcgctgaccacaccgttacgcccgttcaggccggatttgaccagttcgctgtcgaggtagctgtagccagcgaacacctgccattggtcggtgagcttgccgctggcggacaattccacgccgtcgacctgggactcacccgcattctgataggtcagggcgtcgactaggatgcgcgtatttttcttctcggtacggaacaccgcggcggtcagggacaggcggtcgtggaacaggtcccacttggtgcccagttcgtagttgacggtttcttccggctgcaagtcgctgctggcggcgccggcagacagagggttgccgtctgaaccttcaccgaccagccccccggcaggcgtcgccgatgtcgcgtaggaagcatagatgctggcgttttccaccggcttccagaccaggccggcttgccagttgaagaactggctgtcttccttgattttgctgcggccggtcgcggagtcggtgttggccacggtgtcgaaggtgtcgtagcgcaggccgacgttcagcaaccacttcgggtctagctcgatggtgtcgaacacataagcgccacggctggtggccttggtggcggtgccgtagtagttgcgggcgatgctgccggtccaggcatcatccgggttcggattgctcagggaggtgcactggccgcccaggctacccttggccacggtgcagactgggttggcgttggggctgatggtgtagctgctgacgcgggtttcttcaccggtgaactccaggccggtagagtagctgtgtttgaagcccagcgcctggaagctgccgaacaggtcggtctggttggtggtggtggtcgtggtcgacacccggctgttggcgcgacgccacacggtgccatagcggttgacgttgaatttgctgtcgtccggctgggtgagaatgtagtcctggccggtgctgccatggcgcagggtatttttcagcgtcatggtgtcgctcaggtcgtgctcgatggagaacgtgctgatatcggcgcgggtcttgcggaagtcgcgatccttgaggccgtagaagttgttgctgtcgccgccgtcggtgggtttgtcatgcacatgggcggtggcggtcgacgaaccatagccgtagggaatccccgaatccggcaggtcatcgctttccaggtggtagtagctgaggttgacacgggtcggggtgcccaggccaaaggtcagcgacggggccacgccccagcggtcgtaattgaccgcgtcgcggccggcgacgttctgttcatggctcatcaggttcaggcggaacgcggcgctgtcgtcgaggaactggcggttcacgtcgagcacgtagcggcgggtctggtccgaaccgtaggtgaagccgccgttggtgaagtcccgcgcttgtggggtcttgctcaccaggttgaggctgccaccggcagaaccacgaccgccgaacgaagagttcgggcctttgctgacttcgatcgattcgatgtcgaagatctcacggctctggccaccagtgtcgcgcacgccgtccaggtaggtgtcgccctgggcatcaaaaccacggatgaacgggcggtcgccctgggggttaccgccttcgcccgcaccaaaggtgatgcccggcacggtgcgcaaggcatcctgcaacgaggtggcggcggtgtccttgagtacttgttgcggcaccacggtgaccgagcgcggggtatccaccaacggtgcggtgtatttctgcgacgaggctttttcgacctggtaggaggtgttgtcctgcgcttccccggtgatgctggtggcgcccagggaaatgctgttgcgctggcctttttgttcagtctcttcggcggcctgtgccagatgggcgacagagctggcgctgagggcaacgccgatggctgaagccagcatgcgtggtgaaccggcaggtatttttgtagtggtgcgcgacatgacgtgtcctttccccaaggatgtgaggccgcggaatatagggcgaacaagactttctatcaattgcgatacattgctaattgcactgaatttacattctttacacttttggcttacggtttttacgaactcgttcgtctcagcgttttacagagtggataagaatcaataccattggcgcctccccgttttcaggtactgccccatgctgctgcacatccccggcctgttctctcgtgaggaagtgcagcgcattcgccaggccctggaaaacgccgattgggccgacggtaaaatcaccgccgggcaccagtccgccaaggccaagcacaacctgcaattgcccgagggccacccgctggccaaggaaattggcgcggcgatgcttgaacggctgtggcagaacccgttgtttatgtcagcggcgttaccgcataaggtgtttccaccgctgctcaattgctacacggcgggcggcagtttcgactttcatatcgacaacgccgtgcgccaatgcaagggcagccacgagcgtgtgcgcaccgacctgtcatccacgctgttcttcagcgaccccgacgaatacgacggcggcgaactggagatccaggacaccttcggcttgcagcgcgtaaagttgccggccggcgacatggtgctgtaccccggctccagcctgcacaaagtcaacgccgtgacccgtggcgcacgctatgcctcattcttctggacccagagcctggtgcgcgaagacagccagcgcaccctgctgtttgaaatggacggtgcgatccagcaactgacccgcgatgtgcctgaccatcctgcgctgatccaactcaccggcacgtatcacaacctgctgcgccgctgggtcgaggtctgacatgggctttttattacgccgggaagaagtgctcaacgccgagcaactgcaagcgatgctcgacgattcccccgtgcgcgcagcccaggcgatcctgatggcggcgaaggagggggtcgtcgatgcccaggcgttgctcgggcagatcttgctggaagggcgcggcattgcacgcgatgaggcattggccttgcgctggttccagatcgctgcacacagcgggcatttgatggcccgcaacatggctgggcgttgccgcgagcatggctggggatgtgatgtcgacgaggcggcagctgcacgggaataccgggtggctgccgaggcagggttggattgggggcagtacaactacgccaatctgctggctacggggcgcggtgtcgccgaggaccaaccacaagcattggcctgttatcgccgggcggccgagcaggggcatgccaagtcgatgaacctgctggggcgttacctggaagatggccggttctgcccacaggacctgcacgctgctgtggactggtatcgacgctcagccgaggccggagattttcgcgggcagttcagctatgcggcggtgctggccgacagaggtcagatcgacgcggcactgcagtggttgcgcaaggcgttggcgggcgggaacctgaagttcttgcgtgtggcgtacaaggccctggtagcggcgaatgacccgcagatccgggcgatggccgatgcctatcaacaacgtgccatcagcctttcttaaggcgtaaaaaaacccatgacatgtcatgggttttttatgtgcggcctttttacacgtagaacgatttcagtggcggaaagccattgaactccaccgcgctgtagctggtggtgtacgcaccggtcgacagccagtacaagcggtcaccaatcgccaggttcagcggcaggccgtacttgtagttttcgtacatgatgtcggcgctgtcgcaggtgggaccggcgatgaccacttcttccatctcgcctttcttctcggtccagatcgggaacttgatggcttcgtccatggtttcgatcaggccggagaacttgcccacgtccgtgtacacccaacgctcgacggcggtacgggatttacgtgcaaccaataccacttcactgaccaggataccggcgttggcgatcaacgaacggcccggctccaggatgatttccggcaggtcgtcgccgaagtcttccttgaggaagcggatgatttcttcggcgtaggtttccaggctgttggtgcgggtgatgtagttggccgggaagccgccgcccatgttgatcagcttcaggtgaataccgtcttcttctttcaggcgttcgaagatcactttgaccttggcgatcgccgcgtcccacacgctgatgtcgcgctgctgcgagcccacgtggaacgagatgccgtatggcaccaggcccaggtcacgggcgaggatcagcaggtccatggccatgtcggtctggcagccgaatttgcgcgacagcggccagtcagccgtggtcgagccttcggtgaggatacgtacatacactttagaacccggagcggccttggcgatgttgcgcaggtcggcttcggagtcggtggagaacaggcgtacgcctttctcgtagaagtagcggatgtccttggacttcttgatggtgttgccgtagctgatacggtcagggctgacgccacggcccagtaccttgtccagctcgtagatcgaggcgatgtcgaagctcgaacctttgtctttgagcaggtcgatgatctcgacggccgggttggccttgacggcgtaatagaccttggcgaattcgaaaccggcgcgcaggtcatcgtaggcctggctgatcatcgcggtgtcgatcaccacgaacggggtttcttgcttgtcggcgaacgccttcattttgtcaaaagtggcgcgcgcgaaataatcttcgacgttgatcgacatgctgggaactcctaagggcaaactgtagtaatcaatgggtgcaactgaacgtcctccgtatccccactttggttcgcctacttcccaaggcatgtcgccgaaagcaaaaaggccatgggatcaaccgcttcccttggccttgctgtctcgtcgtcagtacttgagccggatggatcgtttccagcatggacgttcggcgcgaactttaggacgtgaggggccatagatcaactaaaaatgtcgcgtttttgcacgcgctcgtcgcacagccgcgtgcagctacttatgtaaccgaccggtgtgacggaatgatgttccccggatagggcaaattggcgggattttgctgacacaacagagggcaaatgtgggagggggcttgcccccgatgtcggagtgtcagccatacataggctgactgacaccctgctatcgggggcaagccccctcccacatttttaaccgagcagcgtcacatcaagccaacgcggtttcagccggcgagacgatactggtcttgccgccacgggacttaccggagcttaagtactcggcaatcgactcctgggtcacttcacccaggaatacccgctccgcatccatcaccggcagccacgagcggttgaactcgtacatgcgcgacagcaggatgcgcaagtgctcgtcatatgcggccgtggcgttaaactcgcgcaggtactggccgcaggtaccggtctgacggtgcaggtcgcgacggcgtacataacccagcgccttgttctcggcacaggtgacgaccacatagcggcggtcggtttcgtccattagctccagggcatcggccaccggcgtttccgggctcaccgacggcgcgttgtccgccgcgtcttcggccttcaccagcagcagacgcttgagggtgctgtcctggcccacgaagttgctgacgaactcgtcggccgggtgtgccagcagcgtgtccgggtggtcgatctgcagcagcttgccggcgcggaagatggcgatcttgtcacccagcttgatggcctcgtcgatgtcgtggctgaccatgatcacggtcttgttcagcgcgcgctgcatctcgaagaactcgttctggatcatctcgcggttgatcgggtcgaccgcgccgaacggttcgtccatcagcagcagcggcgcatcggccgccagtgcacggatcacgccgatacgctgttgctggccacccgacagctcacgcggatagcgatgcaggtactgcttgggctccagcttgatcatgctcatcaactcgcgggcgcggtcgtggcatttctgcttgtcccagccgagcagcttgggcaccaccacgatgttttcctcgatggtcatgttggggaacagtccgatctgctggatcacatagccgatgttgcgacgcagtgtcacttcgtcgaggtcggtggtgtcttcgccgttgatcaggatcttgcccgaggtaggcttgatcaggcggttgatcattttcagcgtggtgcttttgccgcaacccgatgggccgaggaatacgcaaatctcaccttcgttgacggtcaggcttacatcgttcacggccgttacagtcttgccgttgctttggaaggtcttggacaggttttgaagttcgatcatttgagcaatccttttggagtcagcgagcgttgcagccattgcagaagcaggtcggcgaagatggccaggagactgaccagcacggcgccaacgatcagcatcgacatgtcgctgcggctgatggaagccagaataagtacacccaggccaccggcgccgatggtggcggcgatggtcatcacaccaatgttcatcaccacggctgtgcgcacaccggcgaggattaccggcacggcgatgggcaactcgaccatgcgcaggcgctggccgaaggtcatgccgatgcctttggcggcttcgcgaatgcccggctccacgccagtgagggcgaggtaggtgttacgcatgatcggcaacagggagtagaggaacacggcggtgatcgccggcatcggccccaggccctggccgaatttggagtagaacggcagcaacaggccgaacagcgcgatggacggcacggtcagcaacaccgtggcgctggcctgcaatgggccggcgagggtcgggaaacgcgtcatcagaatgcccaggggcacgccgatcaggatcgcgaggatcacggcgataccgaccagggtgatgtgctgcccggtcaggtgcaggacttgggcccaatcaagatgggaaaaggcgttcaggaattccatgtcttctcctcttattgattgatgggatgctggcgcaggaaatcggcggcaacagcggaagggctttcatggtcgacgtcgacccgcgcattcagctggcgcatggtttcgtcgtcgaacaggtcagccaacggtttgagttcagctgcgagcgttgggtgctggtcgaggtattcctggcggatcaccggtgcggcggtgtagtccgggaagtagtgcttgtcgtcttccagcagcttgagcttgaaggcgttcaggcggccgtcggtggtgtagaccaggccggcaaatacctggccgttacgcagcgcggtatagaccaggccggcgtccatctgtcgggtgtttttacgcgtgaggttcatgtcgtacagcttgaccatgccggccaggccgtcggagcggttggcgaactctgtatccagggcgaccaggcggttgctcttggcgtcttgcgccacggccttggtcaggtcgctgatcgtgctgatctcgggatgctcagcggcaactttctctggcagcgccagggcgtaggtgttgctgaagcgcgacggggagagccagaccaggccctttttcgcgtcgagttctttcacccgtgcgtaggactgttcgctgtcgagcttctcgtcgacatggttgtaggccaccagcgacacgccggtgtactcccagatcaggtccagttgcccgctttcctgggcgctgcgcgccaggttgctacccaatccgccggtcacgcgggtgtcatagcccttggtgcgcaggtactgggaagtgatttcggcgagcagggtctgttcggtgaacacccgggcgccgatgcggattaccggtttttcggcggcttgcgcaatgcctgcaaagagcaggacgcagctcactatcaatgtcagttttttcatgtcggttccttaagacgcacgcaacccgcgttccagccagaggcggctggccagggtcaccagaccgtcaagcagcaaagccagcagcgcggtgcacgcggcgccgagcagcaattgcggctgattgttcagggcgatgccggggaagatcaggctgcccaggctgttggcaccgatcaggaacgccagcggcgcggtgccgacattgatcgccagggccacacgcacaccgccaatgatgattggcacggcgttgggcaattccacgcgaaacagcacttggcgcggcgtcatgccgatgccggtggcggcttctttcagggagccctggacgtttttcaggccttcgtaggtgttgcgcacgataggcaggagggaggcgaggaacagcgcgaagatggccgggccgctgccgatgccaagaacgccgagggcgatggccagtacggccaggggcgggacggtgttgccgatgttgaagatctgcatgaagcgttctgcgcgcccgaccatgtgcggtcggctgagcaggataccggcggggatgcccacaacgagggcggccagcatggagacaagaacgaggatcaggtgtgcttgcaggtaaaacaacaaatcgtcgcggtacagttcgatcgtgttgatgccgatccagtggaccagcagggccaggagcgcgacgacaaccgcacctcctatcagccctttgccatagcgaatagccacaggcggactccttttttcttctgtcggcgcccacattctccggcggcaatgccattcctggctgcctctgaatgtggtcgcgaaatgcagctcgtcgataccggcaacgcggtaaaaatccgagccatgagcgcagcctcgtcaggctaacttgctgatttatcagcccctgttccgagtgcgatagcaggggagtggacgtctcgaccttttaaaaggttccatacttggcagcatttagccacccctaatcgggtgaacggtggtccggcacctggggtttgcgctatactcgccgcccttttttgactcacctgccaggcgatttcccatgacccaccaggccgccgaagtcgcgaaacgccgcactttcgccattatttcccaccccgatgccggtaaaaccaccatcacagagaagctcttgctgatgggcaaggcaatcgcagtggccggcacggtgaaatcccgcaaatccgaccgccatgccacctccgactggatggaaatggaaaaacaacggggtatctcgattaccacgtcggtcatgcagttcccgtatcgcgaccacatggtcaacctgctcgacaccccgggccacgaagacttctctgaagacacctaccgcaccctgaccgcggtggactcggcgttgatggtcctcgacggcggtaaaggtgtcgagccacgtaccatcgcgctgatggacgtgtgccgtctgcgtgacacgcccatcgtcagcttcatcaacaaactcgatcgcgatatccgcgaccccatcgagctgctggatgaaatcgaagccgtcctgaagatcaaggccgcgccgatcacctggccgatcggttgctaccgcgacttcaagggcgtgtaccacctggccgacgactacatcattgtctacaccgccggccacggtcacgagcgcaccgaaaccaagatcatcgagaagctcgactccgacgaagcccgcgcccacctgggtgatgagtacgaccgttttgtcgaccagctggaactggtgcagggcgcctgccacgagttcaaccagcaggaattcctcgacggccaactgactccggtgttcttcgggaccgccctgggcaacttcggtgtcgaccacgtactcgacgcggtcgtcgactgggcgccgcgcccactggcacgggtggccaacgagcgcaccgtggaaccggtggaagagaagttctcgggcttcgtgttcaagatccaggcgaacatggaccccaagcaccgcgaccgtatcgccttcatgcgcatctgctccggcaaatacgaaaaaggcatgaagatgcgccacgtgcgcaccggcaaggacgtgcgcatcggcgacgccctgacgttcttctcctccgagcgtgaacagctggaagaggcgtttgccggcgacatcatcggcctgcacaaccatggcaccatccagatcggcgacaccttcaccgaaggcgaaaccctgggcttcaccggcatcccgcacttcgccccggaactgttccgccgtgtacgcctgcgcgacccgctcaaatccaagcaactgcgccagggcctgcaacaactcgcggaagagggcgccacccaggtgttcttccccgagcgcagcaacgacatcatcctcggcgccgtcggtgtgctgcagttcgatgtggtcgccagccgcctgaaagaggaatacaaggtggagtgctcgtatgagccaatcaccgtgtactccgcgcgctggatcgattgcagcgataagaagaagttggaagagttttccaacaaggccgtggaaaacctcgcggtggacggtggcggtcacctgacctacctcgcgcctacccgagtgaacctggcgttgatggaagagcgctggccggacgtgaaattccgcgcgacccgcgaacaccattaaggtctgagcggtaaatagaagggtgaagctgtgatggcttcaccctttttattggccaaacacaaattaaaatgtgggagggggcaagtcgaatcgtcgcaccgcccctcccacattttgatcttcatcgatcagggccattggcgagaaacccacatcccgtctagcgtttcaggtatttcacttacccatcgacggaataggaggccaccgtgcgtataactcaacgcgccattcaactggtgctgctgggggctctggggttgtccgcctcattggcgcttgcaggcgccggagcgccccaatggaagggcacgggccctgtcaccaagaagaagcagcaggaggtcaactccggaagttggcaaccccaggcgcagcctgcgcccaaggaggatgcggaaaacccctataacgaaggggaagacagcgaaacctatgatgacggtgacacctgatagctggcgcaaaccctctatcacaactagcttcaaggactggcgacggtaaatcgctgtcgtacggattcatctactgactggacggaaatcgaccatgactatctttcaacgtgtagtgctgttgctgaaagtgttggtgatgctatccctgggcatctcgtccgcatgggccaatgcggctgtgcagagccaggcgccgggctttgtggcggcgaagacggtgcaggccggtggtttgcaactggccaagagcgagtcggaacccggtgacgaagatcagggcggctcaaaggatgatgacgaccagcaagcgccgccagatgacgatgacactgaaggtgacagcgacacctgatacgtctgggcccccctgcctgtaatgcccgcgatcgttcccgcgctctgcgtgggaacgcattctttgacgctccccattacctttgattgctgagccgatctgtcaggtttgacagtagacggccggcgctcgcctccttatttttcaggtgtctttatccaggggcctttcaatgcctgaaacaggagagcaccatgaaaaacaaagcgacgggacggtttaaatggaaagtgggagctcaggcccttgaatcgaccgatctggattttgtggctgatgaccaaagcgaggatttcgtggttcaagcccgttccactgcaagcgacggtgtagatgtagagctgacgctttatattccagaacgagacccgcaaagtaaaaaatacacctacggttcccatgacgagtatcaagcctcggttcattacactgtcggcggtcgacctaatagttgggagggcggctacgtggttcgggaagcggcggacttttcttccatcgatccgggcatttggcgcgtcaagctcatttttgggattgaggttgccctgaacggcggtgttatttcgataaagggcgagggcgaagtcaaaggggctgctccctggggtaaaaccctgcgcaagcgttttccatccaagcccaaaagaaagcccctcccaccaggctgatgcgcaacctgatgggaggggctgtagaacacatgcaatgccctgggcttagtcacccagggcatttttgttgcggtgtcacgccacaaattgctccgcgtaatggcaagccacctggcggttatccagcggccgcaactgcggctcctcggtgctgcaccgcgccgtcgcgtacgggcaacgcttgtggaacgcgcagcccggcggcgggttcagcgggttgggcagttcgccgacaatcttgatcttcggcttgttcgggtccgggtggatggtcggcgtggccgacagcagcgcctgggtgtacggatgcagcgggcgtgcgtagatgtcttccttggggcccacttccaccgggcggccgaggtacatcaccatcacgtcatcggcgacatgctgcaccaccgccaggttgtgggagatgaacacgtaggccgtgttgaattcctgctgcaggtccatgaacaggttgagcacctgggcctggatcgacacgtcgagtgccgaggtcggttcatccgccaccagcactttcggttgcagcatcatcgcgcgggccagggcgatgcgctggcgctgaccaccagagaacatgtgcgggtagcgctgataatgctcggggcgcaggcccacttgcttcatcatcgcctgcactttttcgcggcgttcggcggcggacaggttggtgttgatcaatagcggctcgccgagttgatcaccgaccttctggcgtgggttcaacgacgcgtacgggctctggaacaccatctgcacgtctttgcgcaattgcttgcgttgggccttgtcggcaccggcgacttcctggccggcgattttcagggagcccgaagacggctcttcaatcagcgtgagcgcacgggccagggtggatttgccgcaacccgactcgcccacaaccgcgagggtcttgccggcttccaattcaaaggacacgccattgagtgcgcgcaccagcgcgtggcccttgaacaggccgcgggacacttcgtagtgacgggtcaggtcgcgggcggtaagaacgacggccattacgccacctcctggttcaaggggtagaagcagcgcgcaaggctgttggttttcggatcaaggccgggacgctgggcgcggcagctgtcctgcacatacgggcagcgcggtgacagcaggcaaccctgcgggcggtcataacgacctggaacgatacccggcagcgtggccaggcgagtggcgccgaggctgtgctcggggatcgccttgagcagcgcttcgctgtacgggtgcgccggaatgtcgaacaactgcggcacctggccgacttccacggcttggccggcgtacatcacgcacacgcgctgggcggtttccgccacgacagcaaggtcgtgagtgatcagcaccaggcccatgttctgctctttctgcagggccagcagcagttccatgatctgcgcctggatggtcacgtccaacgccgtggtcggttcgtccgcgatcagcagtttcggctcgccggcaatcgccatggcgatggccacacgctggctcataccgccggacagttggtgcgggtaggcatccatacggctggcagcgcccgggatttcaaccttttccaacagttcgatggcacgcttgcgcgcttgcttgccggacattttcaggtgcaggcgcagcacttcttcgatctggaagcccacggtgtagctggggttcagcgcggtcatcgggtcctggaacaccatcgccaggtctttgccgacgatctggcggcgctggcggttgctcaacttgagcatgtccttgccgtcgaagttcagggcgtcggcggtgacgatgccggggtgctcgatgaggcccatcagcgccatcatggtcacggatttacccgagcccgactcgccaacgatggccagtacttcgcctttgtcgacggaaatgtcgaggccatcgaccaccggcacggcggtcttgtcgccgaagcgcacgttgagattcttgatttctaacagtgacatgggaatctcctcaggcggcgttcttgagtttcgggtccagcgcatcgcgcaggccgtcgcccatcaagttgattgccagcacgctgagcaaaatggtcaaacccggcaggctcaccacccaccaggcgcgttcgatgtagtcacgggccgaagccagcatggtgccccactctggggttggcggttgtacgccaaggccgaggaagccgagggccgcagcatcgaggatcgccgaagagaagctcaaggtggcctggacgatcagcggtgccatgcagttgggcagcacggtgatgaacatcaggcgcggcaagccggcgccggcgaggcgggcggcagtcacgtagtcgcggttcagttcgcccatcaccgcagcgcgggtcagacgcacgtaggacggcagcgacacgatcgcgatggcgatcacggtgttgatcaggccagggccgaggattgccacaatggcgacggccagcagcagcgacggcagggccagcatgatgtccatcagacgcatgatggtcgggccgagcaagcgcgggaagaacccggcgaacagacccagcaggatgcccgggatcagcgacatcaccaccgacgacaaaccgatcagcaacgacaggcgcgagccctggatcaggcgtgaaagcaggtcacggcccagttcgtcggtgccgagcaggaattgcatctgcccaccctccagccaggctggcggggtcagcaggaagtcgcggtattgctcgctggggttatgcggtgccacccacggagcgaagatcgcgcagaacacgatcagcaacatgaacagcaggccggcaactgcgcctttgttcttggagaaggcttgccagaattctttgtacggggacgggtacagcaggctttgatcgactgctgacactggagtaggtgtggtcatggtcatgatctcagcgctggtgacggatgcgtgggttggcgaagccgtagaggatatccaccacgaagttcaccaggatcaccaggcaggcgatcagcaggatgccgttctgcaccaccgggtagtcccgcgcgccaatggcttcgatcagccatttgccgatgccgggccacgagaagatggtttcggtcaggaccgcaccggccagcagggtgccgacttgcaggccgaccacggtcagtaccggaatcagcgcgttacgcaggccgtgcacgaacaccacgcgtgccggcgacaggcctttggccttggcggtacggatgtagtcttcgcgcagcacttcgagcatcgacgaacgggtcatccgcgcgatcaccgccagcgggatggtgccgagcacgatggccggcaggatcaggtggtgcagggcgtcgaagaacgcgtccggctcgtcagccagcagcgtgtcgatgagcatgaagccggtacgcggctcgatgtcgtaaagcaggtcgatacgcccggaaaccggggtccagcccaggctgaccgagaagaacatgatcaggatcaggccccaccagaagatcggcatcgagtatcccgccagggagatgcccatcaccccgtggtcgaacagggatcctcgcttcaatgccgcgatcaccccggccaacaggcccaggataccggcgaacaacagggcggccatggacagttccagggtcgcggggaagagggcggtgaattcagtccacacgctggtgcgggtccgcagcgattcgccaaggtcaccctgggcgagcttgccgacgtaatccaggtattgcgcatacagcggcttgttaaggccaaggcgttccattgcctgtgcgtgcatctcggggtcgacgcgccgctcgcccatcatgacttcgacggggtcgccagggatcatgcgtatcaacgcaaacgtgagcaacgtgatgccgaaaaacgtggggatcaataaccccagtcggcgggcaataaaactaaacatcttgtcgtgtacctcaatcagccggttaggcaggtccggcgccgtcaatgtcgacggcgccgagcgtttttcttatttacttcacctgggtggtggcgaagttattgttcgtcagagggctttgggtataaccctcgacgttcttgcgcatagcggtgaacattttcgggtaagccatggggatccatggttggtccttgtcgaaaacgtccatggcttgttcatagagtgcagcgcgttgtgcgggttcagccacagcgcgcgccttgtcgatcaagtcttgaaactctttgttacaccagcgcgcgtagttttcgccgtttttcgctgcatcgcaactcaggttcggcgtgaggaagttatccgggtcgccgttatcccccgcccatccggcggataccatgtcgtgttcaccgtttttagcacgcttgagcatttcgccccattccatgactttgatattcaccttcaagccaatctgcgccagatccgcctgcatgcgctgggcgccgagcatcgggttagggttggtcgggccgccgccgttacgggtgaacagggtgaactcggtgccttccggcacacccgcttccttgagcagggcacgggccttgtcgaggtcgcgcggtgggtttttcagcttgtcgttgaagcccagcagcgtggggggaaacgggccggtggcatcgacagcgttgcctttgccgtacagcgattcgttgtagccttttttgtcgaacgcgatgttgatcgcgtgacgcacccgtgcgtcgctcatgtacttgtgggtggtgttcagtgcggtgtaggcggtggtcatcgccgccagttcatcgaccttcaggttcgggtctttcttgatgctgggcaggtcatcgggcttgggatatagcgcgacctggcattcgttggccttgagcttctgcaggcgcacgttgttatcgaccgcaatggccaggatcaacggatcggccggcggcttgccacggaagtactccgggttggccttgaagcgcacctgggcatctttctggtagcggatgaagatgaacgggccggtaccgatcggcttgctattgagctcatcggtcttaccggcggcgagcagtttgtcggcgtattcagcggagtggatggcggtaaacggcatcgcgacatcggccaggaacggtgcttcagggcgcgtcagggtgaagaccaccgtgtggtcatcagtcttctcgacacttttgagcagttccttgaagcccatgctttcgaaataggggaaacccgtggtggatttgttatgccaagggtgtttcgggtccaactggcgctggaagctccagagcacgtcatcggcattcaagttacgcgtgggtttgaaatagtcggtggtgtggaacttgacgtcatcgcgcaggtggaacgtataggtcaggccgtcgtcactgatttcccagctcttggcgagcgcgggaacgatttcagtggtgcctggcttgaagtccaccaaacggttgaacatggtttcagcagcggcgtcagcagtcacggccgtggtgtacaggaccgggtcgaaaccttccgggctggcttcggtgcagaccaccagtggtttggccgaaacgccgatggccacgctcaacaatgcggcagccatggcggcttgtagtgggagcaatttcattcggagccctctgcaatcgatgggaccagacaagcgtagacggcgggctcgtcctgagcccgccgtctacctggtgctaattaaagaatgttgaacgggatggtggtgaccaggcggaattcgcgcaggttgccgtcagactggttttcgctggcgcggtgcgtcacgtaggtggcacgaacggtagtggctttcagaggaccgctctggatcgcataggaagaaccaatgccgtattcctggtggtgctcgccgttctgggcctgaatgccgttgtaggcgaagtctttcacaccgttgtcaccacggtagtgagtgccgtcgataccccagccgcgagccgagtagatgttgaacttcaggcctggcacgccatattcggccatgttgatgccgtaggcgacctggaaggacttctcgttcggaccgttgaagtcggaagtcagggagttggccaggtagatgccgttggtttcgtgcaggtagtcgaagtactcgttaccgttcacttcctggtacgagaaggtcaggctgtgagcctggtgagtcaggcccagcgacagcgagtaggtatcgttgtcgatcgtgcccatcaactttttgccttcgtcgacggttttgtagtagttcaggccggtggtcaggctcagtgcctggctgtcacccagctcatgggtagcgccgaagtagtactggttccagaagtctttcacgttggcggcgaacaggctggtcttcaggctcttgaatggctggtagttgacgccgagggtactgaccttatcggtctcctgcttgccattaccatactcactacggaatttcgacaggctctgctcagtccgcggggatacgcggtcaaagacgccgccctggaacgacaggttgctgaactcttcgctgttgaagctcacaccttcaaagctcgaaggcaatgcgcggttgccgatggtgtcgacgatgccactactgaagttctggcgaccggcggtcaacgtggtgttcgacacacggaacttgacgttggccagacccagtttgctccactggcctactgcgtcaccgaaggagtgagccagggtacggttggagccgccagcgatgtctttttggtcccggtcaagcgctatgtagttgtaagcggcgacttcggtactcacgccaactgtgccttgggtgaagcccgaggtgtagttgaggatcgtgccttgagcccagttgtaacgacgggaggtcgtggtcttgaccgtatcgccttcgtttttgaagtagctgaaacggtcgccacggaacttcatttcgttggagtaccagttacgggttgtaccgcccaggctttgaccgtcgataaagcccttggcctcgctttgcgcgctggtgccggccagtgtggtcggaacgaagtcctggctttgggtttcagcgtaggcggtggccgtgatgctgctgatggccagggccagaagcgctttgctgctcagtttcatggatgaagctcctttggttctctttttaatgccggtcttttttggtgatccggctattgggtgtgtaactcgttcaagccattgcaaacgtttggcgtaggaaaaatcccaacaaaaggccgcgcgtttgcagcaaggcgggggccgccctgcgcaatccggttattttcttatggggtgatactgacgcccgagaacacgttgcgaccgaaggggcttaccttgaacccttcgactttggcgcttaacggctggttgaccgtcgagtgggcgactggcgtgatcggcacctgctgcttgagcagttgctgcgcctgtttgtacagaatagtccgttgttcgcggtcggtgacgaccttggcttgcttgatcagcttgtcgtacgccgggtcacaccacatggagtagttgttcccgccgatggcatcgcagctgtaaagggtgcccagccagttgtccgggtcgccgttgtcgccggtccaaccgatcaggctcacatcgtgctcaccgttcttggtgcgcttgatgtattcgccccactcgtagctgacgatcttgaccttgaggccgatcttggcccagtcgctttgcagcatctcggccatcagcttggcgttggggttgtacggccgttgcaccggcatcgcccacagggtgatttcggtgccttccttcacgccggcggccttgagcagttccttggctttttccgggttgtaggcggcgtccttgatggtctcgtcgtaggaccattgcgtcggcggcatggcgttgaccgccagttgccccgcgccctggtacacggcgttcaggatgctcggtttgttcaccgccatgtccagcgcctggcgcacttcgagctggtcgaacggcttgtggcgcacgttgtaggcgatgtagcccagattgaaccccggcttggtcagcaattgcaggttcgggtcggccttgagggcgtcgacgtcagccggacgcggatgcagggtcacctggcattcgccggccttgagcttttgcacgcgcaccgaggcgtcggtgttgatggcgaaaatcagctggtcgagcttgaccttgctcgggtcccagtactgtttgttggccacatagcggatctgcgaatctttctggtaacgctggaacacgaaggggccagtgccaatcggcttctggttgatgtcgctgggcttgccggccttgagcagttgctcggcatattcggccgacaggatcgcggcgaagctcatggcgatgttctggatgaacgcggcgtcgaccgtgttcagggtgatcaccacggtgtgcgggtcggttttggcgaccttggcaatgttcttgttcaggctcatcccgttgaagtacggaaactcggtggggtaggccttgcgaaacggatggtcggggtcaagcatgcggttgaaggtgaacagcacgtcgtcggcgttgaagtcccgggtcggcttgaattccttgttgctgtggaatttcaccccttcacgcagatgaaaggtataggtcaggccgtctggcgaaatatcccacttggttgccaatgccggtacgacactcgtctcgcccttttcaaactcaaccagtcggttgtacagcggctcggccacatcgttatcggtggcggtggtgtactgcgcggtgtcgaagccggccgggctgccttccgagcagaacaccaggctctgcttgtcggcggcgtgacccatcgtggcggcagccagcaggctggtgccaaaaagtgcggatagaacggtggtatggcgcatgacgatcccgatccttgtttgtagttgtcatcagtgagcaatcaccccggcgttcagccagggagacatcactgatcccacgcgcagcaagtgcctttccgaattgggagcctctgctgtcctacgacgttatgggtcgcggacttcgcagtaaatgcgccaaatcggactgaccttgtaggcaatggagtcgcactgcgcagttcattgctgtaggaagcaacggtttcgagtgtggtccatgtcctacggccaaggcggatgcaataacggcgacgtttatgcaacgtcgccgccagtgatccttacttgccgcttacgctcacgccgtagaaggagttcaagccaaacgggctgatcttgaagtcctgcacggtgttgcgcatgggttgatacaccgtcgagtgcgcgataggtgtcatcgggactgcatctttgaggatatgttgcgcctgcttgtacagctcggtgcgtttggcgacgtccgacgttgccttggcttctttgacgatgccgtcgaatttcttgtcgcaccacttggagaagttgttgccggccagcgagtcgcagccgaacagcacgttcagccagttgtccgggtcaccattgtcgccgctccagccaatgatcatggcctggttctcgccgcctttggaacgcttgatgtactcgccccattcgtagctgacgatgttgaccttcaggccgatctgtttccagtcgttctgcagcatctcggccatcagtttggcgttcgggttgtacggacgttgaaccggcatggcccacagggtgatctcggtgccgtctttgacgccggcctgcttgagcaggtccttggccttggccacgtcgtacggtgcatccttgatggtggtgtcgtaggaccattgggttggtggcatggcgttgacggccagttggccggcgccctgatacacggagtcgatgatctgctgcttgttcaccgacatgtccagcgcttcacgtacgcgcaggtcggacagtgggttggcggcggtctggcccttgaggaccggcatcacgttgtaagcgatatagcccaggttgaaaccggcttgatgcggcagtttcaggtccttgtcatcgcccagcgccttgaggtcggccggacgtgggaacaaggtgatctggcattcatttttcttcagcttctggatacgcaccgacgggtcggtggtgatggcgaagatcaggttgtcgatcttcacgtcttcaggtttccagtagtccttgttgccggtgtaacggatgttcgagtctttctggtagctcttgaacacgaacgggccagtgccgattggcttctggttgatgtccgcggccttgccgtctttcaacagttgggcggcgtattcagccgactggatcgaagcgaagctcatcgccaggttctggatgaaggcggcgtccacggtgccaagggtgaacttgacagtatggtcatcgactttttcgatgttcttgatgttggtgtccatccccatgtccgtgaagtacgggaactcggtggggtaggccttacggaacggatcgtccttgttgatcatgcggttgaacgtgaacagcacgtcatcggcattgaaggtacgggtcggcttgaagtacgaggtggtatggaacttgacgccatcacgcaggtggaaggtgtaggtcaagccatccggggacacgtcccagctggtggccagcccaggaatcacagcggtgccgccgcgttcgaactgggtcaggcggttgaacatggtttcggccgaggcatcgaagtctgttccggtggtgtactggcctgggtcgaaaccggccgggctcccttcggagcagaacaccaggttagtcgccgcttgggcgaaaggagctgcggccataaggccagcgctaacaattaacggaatgactgcgtgtttaagcatgttggcctcatgatttgttgtcatttttggtggtgagggcgacctcgtgagtcggcctgcggatacttatgcaggcgccatacccattgcaagatgctgaaccgttgcgagggtgaaacagtggtacgaacgtacaggaatgtcgcaattatgaaagtttcgacatatttgcgcatatttcgagggttttttcggtgcattcatcgcaccaaaaaagcccaaccgaggcgtctggcgcactcggttggggcgttgctgttacttatctagactcacgccgtagaacggtgtcaggccaaacgggctgatcttgaagtccctcacttccttacgcaggggctggaaaaccgtcgagtttgcaataggcgttataggtacttgttccttaaggattttttgtgcctgttgataccactttatgcgctgttcgcggtcgttgctgaccttggcctgttgcaccagtttgtcgtaggtcgggttacaccatttggcgtagttgctgcccttcaccgcagcacaactgtagagcacgccgagccagttatccgggtcgccgttgtcgccggtccagccataaatcatcgcgtcatgctcgccgtttttggcgcgcttgatgtactcgccccattcgtagctgacgatattggccttgatcccgatcttttcccaatcctgctggatcatttgcgccgacatgcgcgcgttcgggttggaggcgcgttgcacggtcattgcccacaggttgatggtggtacctggtgcaacccctgcttcttttagtagcgccttggctttggtcggatcgtagggcgcgtccttgatggtggggtcataagaccactgcgctggaggcagcgcgttctgcgccaattgtccggcactctggtacaccgccttgataatcgccggcttgtcgatcgccatgtccagggcctggcgcaccttgagctgatccagcggcgggtgggtcacgttgtaggccaggaagcccaggttgaaaccagcctgctgcagcacgcgcaagttcgggtcctgtttcatcacttcgatatcggcagggcgcgggtagccgctgacctggcattcgccggccttgagcttctgcaagcgcgacgcggcatccggggtgatggcgaacaccaggttgtcgagcttcacatcctcgggcttccagtactgtttattggccacgtagcggatctgcgaatccttctggtagcgcttgaacacaaacggcccggtgcctacgggtttctggttgatctcttcggccttgccctgcttgagcagttgcgcggcgtactcggcggattgcaccgaggcaaagctcatggccaggttttgcacaaacgacgcatcgacgttgttcaggttgaagcgcacggtgtggtcgtcaagtttctcgacgctcttgatcgtggtgttcaagcccatgtcggtgaagtacggcgactcggaggggtaggccttgcggaacggactgtcggcatccagcaggcgattgaaggtgaacagcacgtcatccgcgttgaaatcgcgggtaggggtgaagaaatcggtggtgtggaacttgacgccatcgcgcagatggaaggtgtaggtcaggccgtctttggagatgtcccagcttgtcgccaggccaggttcgacttcggtgccgccacgcttgaactgcgtgaggcggttgaacacggtttcggccgaagcatcgaaatcggtgccgctggtgtactggctggggtcgaagccggcagggctggcttcggaacagtagaccagggtgctggctgcctgggccattggcatgaagccgagcaggcctgcggcgaggaggagcggttttaaggcaattctttccatggagacccctgaagtggcagttgatcactgtccgaacgaaaaacggcggttaccgaggttaccgccgttaagcatcttcaggtaggtggaaggctggtggtgctggtcacggcctcattgttgatcgatggttacggcgttttgaccgatacttccacgtgggttggcgcatttttgtcgatagtaaagcggctgcccgctgagctggagtggtgaatggtaaaggtgcgtctgattttgacgttgatgttgtccaggtatccctcttctacgtgtttgaggcgatagtcgccggtggccgatacacgggtaatgtttttcgacgggtcgtagtcgatgtgataggtcgagtcattattggagatcgatacgccctcggccaatacgccttccttcaattcgccagagggtgttcggtgcaggagaaaagattccatggcaggtcccattgaaccttggtgagccacttcggaaatacgggcgcgcagttctggatcgggaatgatttgttcaaactgtttgattttttcagcctgtattgcctgaccattgctccctgtactgcgtaaggtatgttcagtgattccgtcgggcgtggttgttctcaggttgtagtttccgcgattgatatcgagcacaaagtttttggagtagtcgttgtcaccttcccaatgcgtggctttttcttctggcagaagctcaaagtttggttcttccagcgtccaggaaacgttgagtttgtgcttgattgcaccgctttcttcgaagttgctcgtggacaagacatagtccgtgtttttgccgaaatcaaagtagttatcaaacgattcggtcccctgcatttttgagccgtcaagtgtcacgaactgatcggagaacttaggcggtatgcttgattcgtcactgggggctggcgatggcgtacgttgccatggccacttgcgtgcgcctcctgggccgatttcacgggcccattcgccgtccagcgtggaatgagcggtcatcaccggcttgcgtgttgcacgatcaatgatctgtacataatcgttgctcagtttgaaatcgcttttgatctcgtacacctgaggcgtgccggtagcatcggtatagcggataaaccattggtccgtgccatcgggggttttgatttgatagatcccttttgaattgcgggtcgcgccttcgatcagttgctcgccgtttggcactgcgtgctgactgatattggctgcctgagtcggcttgagtcgattgacggagggctcttcgacgatgggcgttgtcggtgtgtcggtgtctggcaccactggctctttgacggtgtcctctatgctctcgctgaccgtggtgacggccccttgctcgccttttattaatttgctcgcctcaccagcgacaacgggcaccgcattcaatacgccaaacacaatatggtccgcgccacctggcttgccatgcttgagttggtccgcgcctatcccggcttccaacgcaccggcagcggcataaaatacctccagtcccactgcgacctcgggcatgacgatagccagcggggtcatcatcaaggcgatctttgtggtggtttccaacacttcaaggatcgtggctttggtgacatctccatcggtggttatttcggtttcggcatcggcgtatgagcgctctttctgccgccgggtcatggttgtgaatgggtcatcggacagcggttcggtagtaatgaaccgttgtgggtcaaattcattgagacgttccagagggccggcatcgggtgcgtcttttttcgaccagccgccgagcccggccagcgtttgattgaccccgtcagagaaaaagcgattggcctggtcacgtaacggaaagtgcatcgacagggcttcacgcttgaccggatcagccgcctgttcagccagccagttcttcatctcggcctggctgttgaacgaatgaatcggcgaggagttgccggggatatacagcaacgtacggttgaaaggtttaccttcggcatcgacgcgtgttgtcttgtcggtgatgtaaagcaggtctgtcgacttgtagccattgatgctcagcaggccaacttccatgttgggatccttgatgatagcgggcgaaagatcatcaagtttgagcttctcccaggtcgtgctcagcggcaggccggcggcgcgcatggccaagtccgtatcactatcgctcaagctgtcgttttcaaattgacgcaaagcacctcccacgaaggatgctttactcatttgttcgtacttgcgctcatgcgcgggccagaactcattcaggaattgcgtatacggtttgctgaagtcggtgttccatacgatgctacgaaataccgcaggtgtttggggtagcaggtttgtacggtcgtatacctctggttggccgggctgcgcccccacgtatatgccttcgtaggtcttctgcgggtgtgcgatcgaaacaaccttatcaaccaccgcgggcaaagggagcgcgggcgcgaggcggtctagccaggtgtgcagggttgatcgcagcttttcgggcgacgtctggtgctcgtcttccttattagcgctctggatgttatgcagcgcggcctgcgtcagtgatattttatttaagactttgccattcttgggttttggttgcttggggtcatagttcaacgtcacgataaacgtgttatccggatcaatatccttgtcccagcgtttcttcaagtcggccttgataatctcagcggtactctggcttggagtcttgaacccttcggcggctttccagatgtacctttccacccctgggttatatggcaggcccggaatgagtgtttcgtgatggttgcgtcgtttggcgcttttctggcggggctcatgctcagcgccgggagcaggcggtgtggcaaggtttgccgagttgctgggtgactcgggcacagatgtcgaggcagggcttaggggcgtctttatcatttgatctcgctcttttgaagtgagcctccctggcagctatgtttcagagagatgcgtggcaaatgatcgtggggacgttccggccttacgttttgttcttttcacattgttgttacggcatacatgttttgaataaaactcttggatagtgcgttgctgcgatgaggtagggcgcgtttccagcgcactataaggaggaacggggaagtgatagcgttgtaacgcgaggtgagtgcggctttatatagatataattgcccccataaaaaaggcgcgtccattcaggacgcgccagatgccatagcatcaggtagcaagcatggctgttgattcaatggttacagccccttttgcccgttcagtgctttactgcagcacttcgatcacgccatcggcactcatgctgacctggctggtgccggcttccacttcgggcgtgggagccgaatcggccatcgcggctttcatcatcatcccgccacgggcgtaaggcatcgggtagccattggtgttgaagttcagattgacgatcttgtagcccttgccgcccagcgcatcggtggccagttgggcgcgagccttgaatgcggcgactgcatccttgagcagcgcatcttcgctggccttgcgcgtggtgtcagcgatggcgaagtccatgttttccattttcagggtattcagcagttcaccggtgagcttggacagcgcagggaagtccgcgctttccaggcgcagctcggcacgctcgcgccagccggtgatcttctggttcttgttgtcgtagatcgggtagctgttgcggctgccctggcgcagggttacgcctttgacttcgcgggcctggcccagcgccttgttcatggtggtggtgatttcggcggcgagcttggccgggtcgctgttctgggactcggtatacagcgtgacgatcatcttatcgcgggccacctcctggctgacctcggcgcgcagggaaatctggttgtagttcagcccttcggcggccacggccggaaggctggccagggtggcgaggccgagggtgataacagcggcactgcgagtgaaacgagacatgaaagctccttggggtggtcgtgttcggtatgactgtagacggtggcagcgggttcttcgggtttacacattacctacaagttgtggcgctgccgacgaacggtcatttgcccggtctgcggcaaagagccacacgtgccgtgccagcgggtcggcttcgtttatactcctgccgatccgcctgcagcgctcaccgggagagctcatgctcgccgccgtaaaactgacttccgccacccgccagaacctctggcgcctgacgttcatccgcacgctggtgctggccgcacaggctggctccgtcgggctcgcctattggttcgacctgctgccgctgccgtggctgcagctgggcgtgaccctcgggttctccattgtgctgtgtgtgttcaccgccatccggttgcgcaccacgtggccggtgaccgagctggaatatgccctgcaattggcttgcgacctgtttatccacagtgtgttgctgtatttctccggcggttccaccaatccgttcgtttcttattacctggtgcccttgaccatcgccgccgtgaccttgccgtggcggtattcggtggtgctgtcgggcatcgccctgaccctctacaccctgttgctggcgcgcttctatccgctgcaaaccttccccatcgcccgggaaaacctgcagatctacgggatgtggttgagtttcgcgctgtccgccgccgtcatcaccttcttcgccgcacgcatggccgaagaactgcgccgccaggaagagctgcgcgccattcgccgtgaagaaggcttgcgcgatcagcaactgctggctgtcgccacccaggccgctggcgccgcccatgaactgggtacgccgttggcgaccatgagcgtgctgctcaatgagatgacccaggaccatcacgacccggcgttgcaggaagacctcggcgtgctgcgcgagcaggtcaagcagtgcaagcagaccttgcagcaactggtacgcgccgccgaggccaatcgccgcctggcggtggagatgcaggatgtgacccagtggctcgacgaagccctgaaccgctggcacctgatgcgtcccgaagccagttaccgttttcatctattagggcagggcaccgtgccgcgcatggcgccgccgccggatctgacccaggccctgctcaacttgctgaacaatgccgccgatgcctgccccgaaggcctgggcgtgcagttggactgggatgccgaagacgtgaccatcagcattcgcgaccacggcgcgggcgtgccgctggccattgccgagcagatcggcaagccgttctttaccaccaagggcaaaggcttcggcctgggcctgtttttgagcaaggccagcgtgacccgcgcgggcggctcagtgaagctctatagtcatgaggaaggtggcacgctcaccgagctgcgcctgccccgtgtcgcacgaggagatatcgatgagtgacgagatccaagtcgaaggcgaagaactgccgcacctgctgctggtagatgacgacgccacctttacccgcgtgatggcgcgcgccatgagccggcgcggtttccgcgtcagcaccgctggatccgccgaagagggcctgaccatcgcccaggccgacctgccagactacgccgcgctcgacctgaagatggacggcgattctggcctggtgctgctgcccaagctgctggaactcgacccggaaatgcgcgtggtgatcctcaccggttattccagcattgccacggccgtcgaggcgatcaaacgcggtgcctgcaactacctgtgcaagccggcggacgccgacgatgtactggccgccttgctctccgagcacgccgacctcgacaccctggtgccggaaaacccgatgtcggtggaccgcttgcagtgggagcatatccagcgcgtgctgaccgagcacgaaggcaatatctccgccaccgcccgcgccctgggtatgcaccgccgtaccttgcagcgcaagttgcagaagcgtccggtacgtcgctgagcctgatctgaacaacagctgaacaatctgcttcaggccgcacggagcctcgaaccgatcaactatgatcggttcgaaagcctgtcatccttttccctaccgagcctggacaatgaatcagaacgctgagtattccgcggtcaatgacgcggtgcgtgggcaatttttacggcgggtgtgggggttgatcacgccttactggcgcagtgaagagaagggcatggcctggctgctgctgttggtggtgctggggctgtcgctgttcagtgtcgccgtgtcggtgtggttcaacagttggaaccgggatttctacaacgcgctggagcacaaggactacgacgcctttacccacctgctgatgtacttcagcgtgattgcggtggtggcgattgtgaccggcgtgttcacctcttatctgcaacagatgctcaccatccgctggcgccgctggctgacggaaagctactttgcccaatggctgggccacaagaattactaccacctggaatacggcggctacaccgataaccccgaccagcgtatctctgaagacctcaatgcctttaccgccagcaccctgaccctggggctgggctttatcagcaacctggtgagcctggtgtcgttctcggtgatcctgtggggcgtgtccggcagcatcgaagtgtggggcatcaccattcccggctacatgttttgggccgccctggtgtatgcggtgatcggtagctggttgacgcacttgattggtcgaaaactgatcggcttgagcaaccgtcaacaacgctttgaggctgacctgcgtttcagcctggtgcgggtgcgggagaacgcggaaagcatcgcgctgttcaacggtgagcccaacgagcgccagcagttaagcgcgcgtttcggacgggtatggagcaacttctggagcatcatgcagctcaagaagcgcctgaatttctttaccagcggttactcgcagatcgcgatcatctttccctttgtcgtcgcggccccgcgttactttgccggcaagatcgaactgggcgtgctgatgcaggtggcgcaggcgtttggcagtgtgcaaggcagcctcagttggtttgtcgacgcctacacgttgttggccagttggcgcgccacctgtgatcgtctgctgagtttcggccaagccatgcaagacaacgaaacccgcaccatgggcattggcctgcagcatcagggcgcggggttgcaggtcaaggacctgagcctggacctggccgacggtcgtcacctgctgcaaggcgccgacctgaccgttgccgagggcgagcgcctgatgctcagcggtcgctccggcagcggcaagtcgacgttgctgcgggcgatgggcaacctgtggcccaacggtcacggcaatatccgcctgccggccgagcgttatctgttcctgccgcagaaaccctatttgccgattggcacgctgaaggcggtgctgagttatccacaggacgacagcgtctacccggcggaacgttatgcacaggtcctggaaacctgccgcctgccccatctgatcgggcgactggacgaagcgaaccactggcagcgcatgctctcgccgggcgaacagcaacgcctggcgtttgcccgcgccttgttgtttgcaccgcaatggctgtacatggacgaagcgacgtcggccatggacgaagaggatgaggcaacgctgtatcaagcgttgatcgatcagttgccggggctgagcatcgtcagcgtcggtcatcgcagcagcctcaagcgcttccatgggcggcatgtgcggatcgagggggggcgtcttcaggaacaactactggcttgagtcctttaggtcgatgtgggagtggggcaagccccctcccacaacaaaaagcccggctgatcatcgatcagccgggctttttagtgcttgaagattaggttacttcttcaaaccgtaatgctcatccagcatgccaggggcgttcggcgtttttggcgcgtagtcccgtggtggctcctggttttcccgcggaggggtcaggcgctcccgtggggtttgcggtgcatcggaatgcaacgcggccagcaggcgctggcgggtgatgtcgtcgagggcgaggcggttggcgccatcggcgagatgatcctgtacttcctggtagctctgggtgagcttcttgaccagggtcgcggtgctgttgaagtgggtaacaacctcgttctgataactgtcaaaacgttcctggatatcatccagctgacgttgcgtgcggttaggcgcggcattcggcagcaagcgagcaaccaggaaaccaatggcgacaccggcaaccagggcaagagtcggcaacaaccaaactaagagcgagtgttccacgagtccttcctctataaacggctttgctttacgttaacggctcaaacctgcgctgtataccgcgattaagctcgcaatgatgccatgcacagacttttagctagacgagtcgaccctttgagaggtcacggagttcattccttgctcatgcgtgaaacccccgttttgatcgatggcccggtaggtcaattggaagccctgtacctggatcaccccgagccacgtggcctggcactgatctgtcaccctaacccggtgcagggcgggaccatgctcaataaagttgtatcgaccctgcaacgcaccgcccgcgatgccggtttgatcaccttgcgtttcaattaccgtggcgtcggcgcgagtgccggcacccacgacatgagcaccggtgaagtggacgatgccgaagcggctgccacctggctgcgggaaaaacaccccgacctgccgatcaccttgctcgggttttccttcggtggctacgtggccgccagcctgggtgggcgcctggaggccaagggcgaaaagctctcgcacctgttcatggtcgctgcggcggtgatgcgccttcgcgataccgatgcgttgccacaaggctgcccattgaccctgatccagccggaaaccgacgaagtggtcgacccgcagaccgtctacgactggtccgccgccttgaatcgcccccatgagctgctgaaagtggcagaatgcggacacttttttcacggcaagctcaccgatctgaaggatctggtgctgccgcgactctcgaattgatagcagtctgataagcgattacccatgacgactcgtacccgtatcctcaccggcatcaccaccaccggcacgccgcacctgggcaactacgccggtgcgatccgcccggcgatcctcgccagccaggacgccaatgccgactccttctacttcctggccgactaccacgccctgatcaaatgcgatgacccgcagcgcatccagcgctcgcgcatggaaatcgccgcgacctggctggccggtggcctggatgtgaaccgggtgacgttctatcgccagtcggacatcccggaaatccccgagctgacctggctgctcacctgcgtggccgccaagggcctgctcaaccgcgcccacgcgtacaaggcctcggtggacaagaacgtggaagccggcgaagacccggatgcgggcatcagcatgggcctgtacagctacccggtgctgatggcggcggacatcctgatgttcaatgcgcacaaggtgccggtggggcgcgaccagatccagcacgtggaaatggcccgcgacatcggccagcgtttcaaccacctgttcggcaacggtaaagaattcttcaccatgcccgaggcgttgatcgaagaaagcgtcgccaccttgccgggcctggatggccgcaagatgtcgaaaagctacgacaacaccatcccgttgttcaccagcgccaaggacatgaaggacgccatctcgcggatcgttaccgactcccgcgccccgggcgaagccaaggacccggacaattcgcacctgttcaccctgtaccaggcgtttgcgaccaaggcgcaggaagaagaattccgtgccgaattgctgcaaggcctgggttggggcgaggcgaagaaccgtctgttccaactgctcgacggccagttgggtgaagcccgcgagcgctaccatcaactgatgtcgcgcccatcggacatggaagacctgctgctggtcggcgccaacaaggcccgtgccgtggcggcgccgttcctggccgagctgcgtgaggcggtgggcctgcgttcgttcgtcaaccaggctgcggcgcccgtggcgaccaagaagaaagctgcgaaggccgcacgcttcgtcagttttcgcgaagacgatggcagcttccgctttcgtctgctggccgctgatggcgagcaactgctgctgtcgcgcaacttcgctgacggtaaagcggccggcgcggtgaccaagcaattgcaaagcggcgacgcgctggacctgcgcaccgaggccctgggcttcagcgtatggctggacggtgccgccgtggccgatagcgccgcgttcgccgacgaagcgtcgcgcgatgctgccatcgccgccttgcgcgttgcgttgacccccctcgaggattaacccgaccaagggttgattgccattatccagggccgtcgttacagtgacggcccgtttttgttgccttgctaacgaaattatgacgcccctagaacgatatcaagctgatctgaaacgccctgaattcttccatgacgcggcccaggaaacggcggtgcgtcatttgcagcgcctgtacgacgacctgctcgcggcctcgcaaagcaagccagggatgttcagcaagctgtttggcaagaaagaccacacgccggtcaagggcctgtacttctggggtggcgtgggtcggggcaagacctacctagtggacacttttttcgaagcgctgccgttcaaggaaaaggtacgtacgcacttccaccgcttcatgaagcgcgtgcacgaagagatgaagaccctgccgggcgagaaaaacccgctgaccatcatcgccaagcgtttctctgaagaggcgcgggtgatctgcttcgatgagttcttcgtgtccgacatcaccgacgccatgatcctcggcaccctgatggaagaactgttcaagaacggtgtgaccctggtcgccacttcgaacatcgtgcccgacggtttgtacaaggacggcctgcaacgcgcgcgcttcctgccggccatcgcgctgatcaaacagcacactgaaatcgttaacgtcgacagcggcgtcgactaccgcctgcgtcacttggagcaagcggagctgttccatttcccgctcaatgaggcggcccacgacagcctgaaaaagagcttccgcgccctcacgccggaatgcacccaggcggtggaaaacgacaagctgatgatcgagaaccgcgaaatcatcgcgctgcgtacctgcgatgacgtggcctggttcgagttccgccaactgtgcgacggcccgcgcagccagaacgactacatcgaactgggcaagatctttcacgcagtgattttgagcggtgtggaacagatgagcgtcaccaccgacgacatcgcgcgccgtttcatcaacatggtcgacgaattctacgaccgtaacgtgaagttgatcatctcggcggaagtcgagctcaaggacctgtacaccggtgggcgcttgaactttgagttccaacgcacgttgagccgcttgctggagatgcagtcccacgaattcctgtcgcgcggccacaaaccctaagatcgatgtagatcaaactgtgggagggggcttgccccctcccacatttgccttgtgtacgctctgactcaggcagcctgctggaattgctggcggtactggtttggcgatagctcggtgtgttgcctgaacaaccgcgcaaagaaactcgcatcgtcgtaacccacctcataactgatggtcttgatgctcttgcggctgcccgagagcaggcctttggccgtctcgatccgcaggcgttgcaggtaatgcagcggcttgtcgccggtggcggtctggaagcggcgcatgaagttgcggatgctcatgccgtgttcccgggcgacgtcttcgaagcggaacttgtcggcgaaatgctcttcgagccagtgctggatctgcaggatgatcacgtcctggtgcagcttctgaccaccaaacccgatacgtcccggcgagtagctgcgctgcacctcgtagagaatgtcgcgggccacggcctgggcgatgttggcgccgcagaagcgttcgatcaggtagatgtagaggtcgcacgccgaggtagtgccgccggcgcaatacaagttgtcggcgtcggtgaggtgcttgtcctggttgagctggaccttggggaagcgttcgctgaaggcattgaagaagcgccagtaggtggtcgcttccttgccatcgagcaggccggcttcggccagccagaacaccccggtggcttcgccgcagagcaccgcaccgcgtgcatgctgttcgcgcagccacggcagcacttgcgggtagcgggtgcacaaggtgtcgaagtcatcccagaaggccggcagcacaatgatgtcggcgtcttccaggccgccgtctaccggcatgatcacatcactgaaactgcacaccgattgtccatcggggctgaccaggcgtgtttcaaacccgggcgtcaggcccaggccttgttgcttgccgtaacgcaggctggcgaggtggaagaaatccttggcttgcatgagggtggaagcgaatacccgatcaatggccaaaatgctgacgcgccgcaagggcgtggagatttggttagacataatttcatttattcttataggggaaagtggtcaccagacggctggatcgtcttattttttgtcgcatgtgtccagtgtcccgtgctgctttcgcggcatagtctctgtgggctcgctcttgtccgacaatccacgcaggtgacccatgattcccagaaccttgttcagcccggaacacgaactcttccgcgagagcgtgcgcaccttcctcgaaaaggacgccgcgcctttccatgggcaatgggagaaacagggctatatcgaccgcaatttgtggagcagggcgggggaggcgggcatgttgtgttctcacctgccggaggaatatggcgggctgggtgcggactttctatacagcgcggtggtgatcgaagagatcagccggctgggcctgaccggtatcggcttttccctgcattcggacattgttgcgccgtacatcctgcattacggcagtgaagcgctgaaacacaaatacctgcccaagttgatctccggcgagatggtcacggcgattgccatgaccgagccgggggcgggttccgacctgcaaggtgtgaagaccactgcggtgctggacggcgacgagtatgtgatcaacggttcgaagacgttcatcaccaacggctacttggccgagttggtcatcgtggtcgccaagaccgatcccaaggccggcgccaagggtaccagcctgttcctggtggaggccgacacgccggggtttgccaagggcaagcgcctggagaaggtgggcatgaaggcccaggacacctcggagctgttcttccaggatgtgcgggtgcccaaggaaaacctgctgggccaggccggcatgggcttcgcctacctgatgcaggagctgcctcaggaacggttgaccgtggcgattggcgctttgtcgtcagctgaggcggcgcttgagtggaccctggattacacccgcgagcgccaggcgtttggcaaagcgattgcggatttccagaacactcgcttcaagttggccgagatggctaccgagattcagatcggccgggtatttgtcgacaagtgcatggcgttgcacctggaaggcaagctggatgtgcccacggcggcaatggccaagtactgggccaccgacctgcaatgcaaggtgctcgatgagtgcgtgcagttgcatggcggctacggcttcatgtgggaatacccgattgcccgggcctgggcggatgcgcgggtgcagcggatttatgcggggaccaatgagatcatgaaggagatcattgcgcgggcgctttgattgggcggttctgctgatggccaaatcgggggcaagccccctcccacacttgaatgtattcacagatcaaaatgtgggagggggcttgcccccgatagcggtcttaagatcaatcaaggcgctgggttcgggtgatccttctgaatcgcctcaatcccttccaatacctctttcgacagtttcagatccgcactggcaatgttgctatccagttgctccagcgacgtggcaccaatgatattgctggtcacaaacggctgctgtgtcacaaacgccagcgccatctgcgccgggtccagcccatgttcccgcgccagtgcaacgtaacggctgcatgccgcttccgactgcgggttgaagtaacggctgaagcggctgtattccgtcagtcgtgccttcgctgggcgggcgccattctcatacttgccgctgagcatgccgaacgccaggggggagtacgccagcaggccgcattgctcgcgaatcgcgacttccgccaggcccacttcaaagctgcggttgagcaggttgtaggggttctggatcgacaccgcacgcggccagccgcgggcttcggccagggcgaggaatttcatggtgccccacggggtttcgttggacaggccgatgtgacggatcttgccggccttcacctgctcatccagcgcttcgagggtttcttccagcggggtgaggttgtcttcgtccttgtgcttgtagctcagttggccgaagaaattggtgctgcgctccggccaatgcaactggtagaggtcgatccagtcggtctgcaggcgtttgaggctggcatccagggcttcgacgatgtgcttgcggttgtggcgcaggtggccgtcgcggatgtagtcgatggtgttgccggggccggcgatcttgctggcgaggatccagtcggcgcggtcgccacggctcttgaagtaattaccgatgtaacgctcggtggtggcataggtgtcggccttgggcggcaccgggtacatttcggcggtgtcgaggaagttgatccccgcgcctttggcccgctcgatctgcgcgaaggcctctgcctcgctgttctgctcgccccaggtcatggtgcccaaggctatcgcgctcacgttcagatccgtacggcccagctgtcgataatccatcgggtactccttcagggaaaacaatcataaaagcaggttgaattttttttcgcaatctgcataattgcccacctctttctgcagtggaagtgatgcgccgcctgccgaagaatcttgccgttgaacggacgcgccgacccgagcccccgatagcgtctgtatccggctgcctttgacttgtcaaagtacgcactattcagtaagatccgccgtctaatttacagggcggcccctgaggctattaaagaatgacaacttttactgcaaaaccggaaacagttcagcgcgactggtttgtcgtcgacgccgctggtcagaccctgggtcgtctggccactgaagtcgccagccgtctgcgtggcaagcacaagcctgagtacacccctcacgttgacaccggtgactacatcgtgatcatcaacgctgagcaggttcgtgtaaccggcaacaaagcaagcgacaaaatgtactaccgtcactccggtttcccaggcggtatcaagtcttccaacttcgaaggcctgattgccaagaagcctgaagccccgatcgaaatcgcggtcaaaggcatgctgcctaagggcccactgggtcgcgatatgtttcgcaagctgaaagtctatgcgggcgctgtacaccctcatgctgctcagcagccccaagaactgaagttttaacggaatagttcattatgtcggcgactcaaaattacggcactggccgtcgcaaaaccgcaaccgctcgcgttttcctgcgtccgggtactggtaacatctcgatcaacaaccgctccctggacaacttcttcggccgcgaaactgcccgcatggtagttcgtcagccgctggaactgaccgagaccgttgaaaagttcgacatctacgtcaccgttatcggtggcggtgtaagtggtcaagctggcgcaatccgccacggtatcactcgcgctctgatgcagtacgacgaaaccctgcgtggcgctctgcgcaaagctggcttcgtgactcgcgatgctcgtgaagttgaacgtaagaaagtcggtctgcgtaaagcgcgtaagcgtccgcagtactcgaagcgttaattcgctttacgttccacaaaaacgcccagcctcctcacggagctgggcgttttttattgcctgcgatttatgcagaaaaatcgccgtgacaacttgccacatccgtagaccccctatactacaaggcctggaggcggagccccgggcaattcccttgtcagacgtggggcttttcattaccattcggcaaaatttttataagtaaagattcaacacttagtagacgcctgatttaacaggccaaaaagctgatgggagaggactgaatgagcaatgacggcgtgaatgcaggccggcgtcgcttcttggtagcagccacatccgtggtgggtgctgcaggagcggtgggggctgcggtcccgttcgtggggtcatggtttcccagtgccaaggcgaaagccgcaggtgcaccggtgaaggtgaatatcagcaagatcgagccaggccagcagatgattgctgagtggcgcggccagccggttttcattgttcgtcgtaccgaggaaatcctgggaaatctcaagaagatcgaaggccagttgtctgaccccaaatccgagaaatccgaccaacccgcctacgccaagaatgaagtgcgttcgatcaagccggagatcctgctgctggtcggtctctgtacccacctgggttgctcgcctaccttccgcccggaagtggccccggtcgatctgggcaaggattgggtcggcggttatttctgcccctgccacggctcccactacgacctcgctggccgtgtctacaaatcccagcctgctccgctgaacctgccggttcctccgcatacctacgaaactgacgacctcattgtcattggcctcgataaggagaacgcgtgatgagcaagttcatggattgggtggatgcgcgcttccccgccactaaaatgtgggaagaccatctcagcaaatattacgcgccgaaaaacttcaacttcttctacttcttcggctccctggccctgctggtgctggtcaaccagatcgtcaccggcgtctggctgacgatgagctatacgccgtcggcagaagaagcgttcgcttccgtcgagtacatcatgcgtgacgtcgagtacggctcgatcctgcgcctgctgcactccaccggcgcctcggcgttctttatcgtcgtctacctgcacatgttccgtggcctgctctacggctcgtaccagaagcctcgcgagctggtgtgggtgttcggcatgctgatctacctggcgctgatggccgaagccttcatgggctacctgctgccgtggggccagatgtcgtactggggcgcccaggtgatcatctcgctgttcggtgcgatccctgtgatcggcaacgacctgacccagtggatccggggcgactacctgatctccggcatcaccctgaaccgcttcttcgccctgcacgtggtggccttgccgatcgtgatcctgggcctggtggtgctgcacatcctggcgttgcatgaagtcggctccaacaacccggatggcgtggacatcaagaagcacaaggacgaaaacggcatcccgctggatggcattccgttccacccttactacaccgtgaaagacattgtcggcgtggtggtgttcctgttcgtgttctgctcgatcgtgttctttttcccggagatgggcgggtatttcctggaaaagcctaacttcgaacaggccaacgccttcaagacacctgagcacattgccccggtgtggtacttcacgccgttctacgcgatcttgcgcgcgatccccgacaaactcatgggcgtgatcgccatgggcgcggccattgctgtgctgttcgtgttgccctggctcgatcgaagcccggtcaagtccatgcgctacaagggctggctgagcaagatctggctgtgggtgttctgcattgcgttcgtgatcctaggtgtactgggcgtattggcaccaacccctgagcgtacgttgctgtcgcaggtctgcaccttcctgtacttcgcctacttcattctgatgccgttctacacccggctcgagaagaccaaaccggttccggaaagggtgactggctgatgaaaaagttatttgttgctttgatgcttgcggccctgccgctcctgtccttcgccgccgaacacggtggcccggcgctggaaaaagtcgatatcgacgtgtctgacaaggcagccatgcaagacggcgcgcgtacgttcgccaactactgcatgggttgccacagcgccaagttccagcgttacgagcgggtggccgatgacctcggtatcccccatgaaatgatgctggagaagctggtattcaccggtgccaagattggcgaccacatgaccatcggcatgaagcccgccgacgccaagacctggttcggcgcggcaccgcccgacctgaccctggtggcacgtgtacgcggcaccgattggctctacggctacctgaaatccttctacgaagacccggcgcgcccttatggcgtgaacaaccgtgtgttcccgaacgtcggcatgcctaacgttctggtcggcctgcaaggcaagcaagtggtaggatgcaagcagattcaggtcgttgaagacggcaagaagcaatacgatccgttgactggcacgcctttgactcatgaagcgtgcgatcaactgaagatagaagccccaggttcgttgacagacgagcagttcgacgagaaggtcaagaacctcgtgaccttcctggcctactcggccaacccggtcaaactgcagcatcagcgcatcggtacgtatgtgttgctgtacctggccttcttcttcgtattcgcctatctgctcaaacgcgaatactggaaggatgtgcattgatccaaccgtaagcaattgctgttaatcttgcgcgcccagcggcatctctgaatacgtagcggtctggttgtaccaggcgttacagagatgctctctgggcgcgctcgtttttgagctttcgataatttcaacaagcgaggaggaccgccatgggcgtgaccaaccggttggcctgttactccgaccccgccgaccactattcccaccgagtacgtatcgtgctcgcagagaagggtgtcagcgccgagatcatcagtgtggaagcaggtcgtcatccacccaaactgatcgaagtgaacccctacggcagcttgcccaccctggtcgatcgtgacctggcgttgtgggagtcgaccgtcgtgatggaatacctggatgagcgttacccgcatccacccttgctgccggtgtacccggtggcgcgtgccaacagccgcctgctgatccatcggatccagcgtgactggtgcgggctggtggatgtgatcctggatacccgcagcaaagaagcggcacgtgtacaggcgcgtaaggaattgcgcgagagcctgaccggcgtttcgccgctgttcgccgataagccttttttcctcagtgaggaacaaagtttggtggattgctgcctattaccgatactctggcgtttgccgattcttggtattgaactgccgcggccagccaagccgctgcttgattacatggagcgccagtttgcgcgtgaggctttccaggcgagtctgtctggtgtcgaacgcgatatgcgctaaggcttaaggagccgctgatgaactccagtcgaccctacctggtccgcgcgctctatgagtggattgtggacaacgattgcaccccgcacatgctggtcaattcggaatttcctgcggttcaggtaccgcagggttttgccagcgacgggcagattgtgctgaacgtatcacccagtgccgtacgccatctgcacatggacaatgaagcggtcagcttcgaagggcgtttcggcggtgtgccgcatacgctgtacgtgccgattggcgccatcctcggcatctatgcccgggagaacggccaaggcatggtgttcgatctggagtcgcctttcgaggacgacgaatcgatcgaaagcgaagagggtgatgatcagccgccaccagactccgagccaccgcgccccagcggccggccgagcctgaaagtggtgaaatagccggcgttcccctcggggttagccgaaaaaaagcctcgacctgtgtcggggcatttttttgcgcgaaggatgtagatgaaagtcgcgcccggacggtgatcgtacaaccaccatgggctatgatgcgtgctcaagttcgccgagaaagatgattcatcatggaaaacgccaacaccgcccctcgtcttccccgcaagcgccgcagccttgcccaggaattggtcacggtgttgtccgagcagatccgcgacggccagctcaagcggggcgacaaactgcccaccgagtcggcgatcatggacgcccatggcgtcagccgcacggtggtgcgtgaagccatctcacgcttgcaggcggcagggcaggtggaaacccgtcatggtatcggcacctttgtgctggacacgccgagcccgagcggctttcgcatcgacccggctaccgtggtgaccctgcgtgacgtgctagcgattctggaattgcggatcagcctggaagtggaatccgccggcctggccgccttgcgccgcagcgatgaacaactggccgccatgcgtgcggcgttagatgccctgaatgaaagcgcggcccacgccggcgatgcggtggcctccgactttgccttccacctggaaatcgcgctgtccaccggcaaccgctacttcaccgacatcatgacccacctgggcaccagcatcattccgcgcacccgcctgaattcggcgcgcctggcccatgatgaccagcagcactacatgagccgcttgagccgtgagcacgaagagatctatgaggcgattgcccgccaggattcggatgcggcgcgggcggcgatgcgcttgcacctgaccaatagccgcgagcggctgcgccatgcccatgaagaggcagaggcgcagcgcatctagaagtgctgcctgtaggcgcggttgtcagtttgtcggggtgtttggcttgtagtccttgagcagcaggtaagtgctccacccccaccaatcattcgtccagcgcttgtcgttcaggtcattcacatccttgcggcgcagcaccttgtctccctccatcttgaacagcggcgaaaagttgttcgccgggttctgtgccgcattcaggtcgggcacatacagcggtgccttgaagttggccggggagggcgcggcaccactgataaacgtatcgaagatctcatcggctgaagcttgcaccgcacgtttgacctgcatccggttgtccgcatcgatatcatcgaagtagcgcttgtccccatacgcgtgccattgatcgcccagggcattgcgcactttcagcccgaatttgctgtcttcatcgtgcatgaagcggctgatcagcgaacccagttcaccgggtgtcaccaccgctgccagttgtttgcgcggtacacgcaagtggcctgccgaaaacagatcggtcaaaaagtgatcagcaaagctgttcatggcataggccagttccagcgcctggtcggtaccgatctggtgcgccacgacggcttgttgcagcgccactgtgtgccccgccaggtacgcggacagcgcccattcgccgaagtggtcggcattgtctgccgccagcttcaggtagcggcccagtgggatcagcgctgacaccgcactgccaccgccggtgatgcggttccattcctcagacaacgtatcacccaaggcgtcgtaggcttcatgggcctgcttgccatccttgatcgcttgcttgactgcattgatctccttttgcatcaccgcgaggatcttgtgcgcttcttcccgcgaggcgggtagcgcggcgagcgtgttgaaagcagcggaaaagcgttgcacacgttcggcaggggaggcgccatcactgatgggctggccggggatgccatagaagtcgccgcccaaggcaatgatctggccataggtcaacgccagcccgttgggcaggtgcagctcgacttggcgggcgggaattgccggggcgtccttggcgaagcgcagtagcgtgtcgtcgccgatggcggtgtgttcacccccttcgaaacgcaggacaggtggttttttttcggatactgcgagatcaagacctgacatgttagctccttgctatgtcgtaggaatcttccttaattactgtatgtatatacagttttatcgagcatagagtaaaaacttcctacgtcaagacggtgctcttcaacccctcgttgaatgaagtctgatgaattgcagttgacgaatctttttatagttgtacgatgacgtacgacatcaccaaaaccaacaacaacctttcgatagaaagtcttcgcccagggtgttcgaataatgaatccacaagaactgaagtccatcctctcccacggtctgctgtcttttccggtgaccgatttcaatgcccagggtgacttccaccaggcgggctacatcaagcgcctggaatggctcgccccttacggcgccactgccttgttcgctgccggcggcaccggtgagtttttctccctcgccgccagcgaatattcccaggtggtgaaaaccgccgttgatacttgcgctaccagcgtgccgatcctcgccggtgtcggcggttcgacccgccaggccatcgagtacgcccaggaagccgaacgcctcggcgcaaaaggcctgctgctgctgccgcactacctcaccgaagccagccaggacggcgttgccgcccacgtagaagcggtgtgcaagtcggtcaaaatcggcgtggtggtctataaccgcaacgtctgccgcctgactgcgccgctgctggaacgcctggccgagcgctgcccgaacctgatcggctacaaggatggcctgggcgatatcgaattgatggtgtcgatccgccgtcgcctgggtgaccgtttcagctacctcggcggcctgccgacggcagaggtttacgccgctgcctacaaggccctgggcgtgccggtgtactcctcggcggtgttcaacttcatcccgaaaaccgcgatggatttctaccacgcgattgccaaggacgatcacgccaccgtcgccaggatcatcgacgacttcttcctgccgtacctggatatccgtaaccgcaaggccggttacgcggtaagcatcgtcaaggcaggtgcaaaaatcgccggctacgacgcaggcccggtgcgcacgccgctgaccgacctgctgccggaagaatacgaagccctggccgcgctgatcgacaagcaaggcgcgcaataacctatctacaaggccgctgagcaatcagcggccttttgcgtcaggagaagatttgtgtcccaagcccaacgtttcgataactacatcaatggccagtgggtggccggtgccgactattgcgtcaacctcaatccgtcggagttgtccgatgtcattggcgaatatgccaaggctgatgttgcccaggtcaacgctgccatcgatgctgcccgtgctgcatttccggcctggtcgacgtccggcatccaggcgcgtcacgatgccctggataaagtcggcagcgaaatcctcgcccgccgcgaagaactcggcaccctgctggctcgcgaagagggcaagaccctgcccgaagccatcggcgaagtgacccgcgccggtaacatcttcaagttcttcgccggcgaatgcctgcgtctgtccggcgactacgtgccgtcggtacgcccgggcgtcaacgttgaagtcacccgtgaagccctgggtgtggttgggctgatcacgccgtggaacttcccgatcgctatccccgcctggaagatcgccccggccctggcctacggtaactgcgtggtgatcaagccagccgagttggtgccgggctgtgcctgggccctggcggaaatcatttcccgcgccggtttccccgccggtgtattcaacctggtgatgggcagcggtcgcgtggttggcgacgtgctggtcaacagcccgaaggtcgatggcatcagtttcaccggttctgtgggtgttggacgccagattgccgtcagctgcgtctcgcgccaggccaaagtgcagttggaaatgggcggcaagaacccgcagatcatcctcgacgacgccgacctcaagcaggccgtcgagctgtcggtacagagcgcgttctactccaccggccagcgttgcaccgcttccagccgcttgatcgtgaccgccggcatccacgaccagttcgtcgcggccatggccgagcgcatgaagtcgatcaaggtcggccatgcactcaagagcggcacggacatcggcccggtggtttcccaggcccagttggaccaggacctcaagtacatcgacatcggccagagcgaaggtgcgcggctggtcagcggtggcggcctggtgacctgcgacaccgaaggctactacctggcaccgacgctgtttgccgacagcgaagctgcgatgcgtatcagccgtgaagagatcttcggcccggtggccaacgtggtgcgcgtggcggactacgaagcggcgctggccatggccaacgacaccgagttcgggctgtcggcgggcattgccactacctcgctcaaatacgccaaccacttcaagcgccactcccaggccggaatggtgatggtcaacctgccgactgccggcgtggattaccacgttcctttcggtggccgtaagggctcatcctatggttcgcgtgagcaaggtcgctatgcgcaagagttctacaccgtggtgaagaccagttacatcggttcgtaacacgcatcactttgtgggagccggatgcctgccggctcccacattaaaaacagaaaaccattacccgcaaaaaaaataattagtgggagtacttctacatgcaagcgaccaagccgacccacgtccgctatttgatcctgctcatgctgttcctggtgaccacgatcaactacgccgaccgggccaccatcgccatcgcgggctccagcctgcaaaaagacctcggcatcgacgcggtcaccctcggttatatcttctccgcattcggttgggcctacgtggccgggcaaattcccggtggctggctactggaccggttcggctcgaaaaaagtctatgccttgagcatcttcacctggtccctgttcactgtgctgcaaggctatgttggtgaattcggggtctccaccgccgtggttgcgctgttcatgctgcgtttcatggtgggcctggctgaggcgccgtccttccccggcaacgctcgtattgtggccgcctggttcccgactgctgagcgcggtacggcgtcggcgatcttcaactcggcgcaatactttgccaccgtgctgtttgcgccgctgatgggttggatcgtctacagcttcggctggcagcatgtgtttatcgtgatgggcgtgatcggcatcattttctcgctgatctggctgaaagttatccacagcccgcgccagcacccgatgatcaacgaagctgagttcaaccacatcgcggccaacggcgccatggtcgatatggaccaggacaaaggcaagggtaagaaaaccgatgggccgaagtgggattacatccgccagttgctgaccaaccgcatgatgctcggcgtgtacctgggccagtactgcatcaacggcatcacctatttcttcctcacctggttcccggtgtacctggtgcaggaccgtggcatgaccatcctcaaggccggtttcatcgcctcgttgccggcgatctgcgggtttatcggtggcgtgctcggcggggtgatttccgactacctcttgcgcaagggccattccctgactttcgcgcgcaaggcgccgatcatcggtggcctgctgatctccagcagcatcgtggcctgcaactacgtggatatcgaatggatggtggttggcttcatggccctggccttcttcggcaagggcgttggcgcactgggttgggcggtggtgtccgacacctcgccgaaacaaatcgccggcctcagtggcggcttgttcaacaccttcggtaacctggcgtcgatcaccacgccaatcgtcatcggctacatcatcagcaccaccggctcgttcaagtgggccttggtgttcgtgggtgccaacgccctggtggcagtgttcagctacctggttatcgtcggcccgatcaagcgcgtagtactcaaagagccgccaagcaaggggcctgagttgaccaacctaaccgaagcgcattcctgaggggcgatgtaatgcagttgattgaacatgccgactcgccgcgctcgattcgtttgcacgagcgcgacaacgtagtgatcgtggtcaatgaccagggcgttccggccgggaccgagttcccggacggcctggtgaccgtggatttcatcccccagagccacaaagtgaccctggaagatatccccgaaggcggccagattattcgctacggccagaccatcggttacgccctggcgccgattccacgcggcagctgggtgcaggaggatcaactgcgcatgcccaccgcgccaccactggacagcttgccgctgtccaccgaggtgcctgaaacccaggcgccgctggagggctttaccttcgagggttatcgcaacgccgatggcaccgtgggtacgcgcaatatccttgggatcaccaccacggtgcagtgcgtcacgggcgtgctggaccatgcggtcaagcgcatcaaggatgaattgctgcccaagtacccgcatgtggatgacgtggtggcgctgacccacagctatggctgcggcgtggcgatcaccgcgacggatgcctacatcccgatccgcaccgtgcgcaacctggcgcgcaaccccaacctcggcggtgaagccctggtgatcagcctgggctgcgagaaattgcaggccgggcaggtgatgcacgacaacgacagctcggtcgacctgagtgagccctggctgtatcgcctgcaggactccagccacggttttaccgaaatgatcgagcagatcatggagctggccgagacgcgcttgaagaaactcgaccagcgccgccgcgaaaccgtgccggcgtccgagttgatcctgggcatgcagtgcggcggcagtgatgcattctccggcatcaccgccaacccggcgctgggctatgcctcggacttgttgctgcgggcgggggcgacggtgatgttttctgaagtaaccgaagtccgcgatgccatctacttgttgacgtctcgcgctgaaagcaaagaagttgcccaggagctggtcagggaaatggattggtacgaccgttacctggccaagggcgaggcggatcgcagtgccaacaccacgccgggtaacaagaagggcgggttgtcgaacatcgtcgagaagtccttgggctccatcgtcaagtccggtagcagtgcgatcaacggtgtgcttggcccgggtgaacgcttcaagagcaaaggcctgatcttttgcgcgacgccggccagtgactttgtgtgtggcaccttgcaactggcggcggggatgaacctgcatgtgttcaccaccgggcgtggcacgccttacggcctggcgatggcgccggtggtgaaggtgtcgacgcgcacggagctggcgcagcgctggccggacctgatcgatatcgatgccgggcgcattgccaccgggcgtgcgaccatcgaggagctggggtgggagttgttccacttctatctggatgtggccagcggcaagaagcagacgtgggcggaacaccacaagctgcacaacgacatcaccttgttcaacccggcgcctattacctgagaccgagtcgcctgcatcgggggcaagccccctcccacattttgaacggtgagcaccgtcagaggtgggagggggcttgcccccgatagcggtagaccagacgaagcggcctacactggcttatcattagccacctaacgacgctcaccaaggttctccccggcatgctggcaattttcctctccaccctcaccatcaccgcgccggtgtttgccatgctgttcctgggtgtgttgctcaagcgcatccactggatcaacgataactttatccacacggcctcgtccctggtgttcaacgtcaccatgccggcgttgctgttcctcggcattctgcatgccgacctgcacgcggcgctcaagccgggcttgctgatctattttgccgtcgccaccttgctcagctttgccctggcctggggttgggcgatctttcgttgcccgcgtgaagaccggggcatctacacccagggggcgtttcgcggtaataacggtgtaatcggcctggcgctggccgccagcatgtacggcgactacggcatctccctcggcgcgatcctcgcggcgctggtgatcctgttctacaacacgctgtcgaccatcgtgctggcggtgtacagcccggtgatcaagtccgacccatggagcatctgcaagagcgtgctggccaacccgttgatcatcagtgtgatcgcggcggcgccgttcgcctatttccagatcggcctgcccggctggctggaaaagtccatgcagtacctggcggacaccactttgccgctggcgttgatctgcatcggcggcaccttgtcgctggcggcactgcgcaagagcggcaacatggcgctgagcgcgagcctgatgaagatggtctggctaccggtgatcgccaccctgggcgcgtggctgctgggctttcgcgggccggagttggggattctgttcctgtacttcggcgcaccgacggccgcggcgagcttcgtgatggccagggcggccgagggcaaccatgaactggcggcggcgattatcgtgatcaccaccttgatggcggcggtgaccacgaatatcgggatctttgtgttgcaggcgggtggttggatctgaacgttcgggtgcctgtgagggccaatcgggggcaagccccctcccacattggacggggaatacattcaaggtgggagggggcttgcccccgatagctatctgaccgtcactgctgatctgtctgatacgcgtcgatcacttcctgggcggcacggaacgcatcaatcgctgccggcacaccggcatacaccgcgcaatgcagcagtgcttcgcggatttcctccacggtgcaaccgttgttcagtgcgccgcgcacgtggcccttcagttcctgtgggcacttgagcgcggtcagggcggcgagggtgatcaggctgcgggtcttcagcggcaatccttcgcggttccacacgctgccccaggcatgttcgttgacgaaatcctgcagtggctggctgaactcggtggcattgcccagggcgcggtcgacgaacgcatcgcccatgacctgacgacgcatttccaccccgggcttcttctgatcggtcattgcggttccctcttgtgttggcggcgccaggctcgcagcgtgctgaacaacagaaaagccaccagcactggcaggacgtaatacagcatcagttgttcaagcttgttggccaggggcatgcccgtggtgaacgccatcacatgcagcccgtacgccaggtacaggcccagcagcaccaggccttcggcgcgggtcacgcggtaaccggtgtagaacaccggcaggcacagcaccaccacgccgagcatcaccggcaggtcgaaatccagggcgttgggtgataccgacagcggtgatggcgcgagcagggcggtcaggcccaatacaccgagcaggttgaacaggttgctgccgatcacgttgcccacggcaatgtcacgttcgccgcgcagggcggcgatcagtgacgtggccaggcagggcagcgaggtgccgacaccgatcagggtcaggccgatcacacgctccgacaggcccaggtcgctcgccacgtccaccgccgcgcccaacagcaaatgcccggccagtaccagcaccagaaaaccgccgagcatcaacagcacgctgctcagccagggcgcgctggccaccgtatccagcgtgcgcgggcggcgggagtggcgcgtctggtagtgcaatacgccgaggtaagcgagcagggcaacgagcagcatcaggccgtcgctgggcgtgagttcttcgttggccgccagggtgaacaccagcagcccggccaggatcatcacggggatgtccaggcgcaccaattggcgtgagacccgcagcggaacaatcaacgccgacaggcccagggtcaccaggatgttgaagatgctgctgccgatcacgctgcccacggcgatatcggtattgccggccagggtggcttgcaggctgacagtcatctgcggcgcgctgctgccgaaggcgacgatggtcaggccgatgatcagtggccgcactttgaggctcgcggccaggcgcacggcggcgcgcaccaggatttcggcaccgaggatcagcagcaccaggccgctgaccaattccagcaggctccagggcgagagggcggttaatccgaaaatggccagggctccgtcttcaattgctcagggcttgcacgcgaacccgcgccgtaccgctgctgatcatacccagctgttcggcagccttgcgtgaaagatcgatcaagcgcccacgggtatgcgggccgcgatcattgatgcggacaaccacggatctgtcgttgtcgagattggtgaccttgacctgggtgccgaagggcaggcgccggtgggcagcggtcatggcgttctggttgaagggttcaccgctggcggttttgttgccgtggtgtttggcgccgtaataggaggcggtgccggtttcgtcgtagccgttggggtcgatgaggccgctggcgcagccggccaacagggagaacagggccaggaggccgagtagacgcttcattcaaggtttccccatgtcaaaggtagaatgaacttatgtgggagggggcttgcccccgatagcggcgcatcagccagacattcgtcagctgacactctgcaatcgggggcaagccccctcccacattggtccgagccgagcatgaaacctgactcggacccttcatcgctatcagccttcgagcttgcttttcagcagttcgttcacctgttgcgggttggccttgcctttggaggctttcatcgcctggcccacaaagaagccgaacatcttgccgcgcttggcttcgtctgccgcacggtattgttcgacctgctcggcgttggccgcgagcatttcatccagtacggccgagatcgcgccgctgtcggtgacttgcttgaggccgcgcttctcgatgatctcgtcggcactgccttcgccactggccatggcttcgaacacggtcttggcgattttgccggagatggtgttgtccttgatgcgcagcagcatgccgcccagctgctcggcgctgaccggggcttcgtcgatttccaggccctgcttgttcaacaggctgcccagctcaaccatcacccagttggccgccagcttggcgtcaccggcaatgctcacgactttttcgaagtagtcggcttgctcacggctggacgccaggacgctggcatcgtagaccgacaggccgaactgctcctggaagcgctcgcgtttctgctgcggcagttccggcagggtggcgcggatgtcgttgaggaacgagtcctccagcaccaccggcagcaggtccggatcggggaagtaacggtagtcgttggcttcctctttgctgcgcatggcgcgggtttcgtctttgttcgggtcgtacaggcgggtttgctggatgaccttgccgccgtcttcgatcagctcgatctggcgacgcacttcgctgttgatcgccttttcgatgaagcggaacgagttgacgttcttgatctcgcagcgggtgccgaattcgacctggcctttgggccggatcgacacgttgcagtcgcaacgcagcgagccttcggccatgttgccgtcgcagatgcccaggtagcgcaccagcgcgtggatcgtcttgacgtaggctacggcttccttggcgctgcgcatgtccggctcggagacgatctccagcagcggcgtgccggcacggttcaggtcgataccggtcgcgcccgggaattcttcgtgcaggctcttgccggcgtcttcttccaggtgcgcacgggtcacgccgacgcgcttgatggtgccgtcttccagcgggatgtccaggtggcccttaccgacgatcggcaattccatctggctgatctggtagcccttgggcaggtccgggtagaagtagttcttgcgcgcgaacacgttgtgctggccgatctcggcgtcaatcgccaggccgaacatcaccgccatgcgcaccgcttcctggttcagcaccggcaatacgccgggcatgcccaggtcgaccaggctggcctgggtgttgggctcggagccgaacgtggtggcgctaccggagaaaatcttcgattgggtggcgagctgggtatgaatctccagcccgatcacgacttcccattgcatagtgttctcctcagaagccggtaggggtgcgagtgtgccagtcagtgttcaactggtactggtgcgccacattgagcaggcggccttcctggaaatacggggcaagcaattgcacgccgaccggcaggccatcgacgaagccagcgggcatggacaagcccggcaggcccgcgaggttggcggtgatggtgtacaggtcttcgagatacgcagccaccgggtcgccgttcttggcgccgagtttccaggccgggttcggcgtggttgggccgagaatcacgtcgacctgttcaaaggcggccatgaaatcgtttttcaccaggcggcggattttctgcgccttcaggtagtacgcgtcgtagtaaccggccgacagggcgtaggcgccgaccatgatgcggcgctgcacttcggcgccgaagccttcgccacgggagcgtttgtacaggtcggtgaggtctttcgggttttcgcagcgatagccgaaacgcacgccgtcgaaacgcgacaggttcgaagaggcctctgccggcgcgatcacgtagtacgcagggatcgcgtgctggttgtttggcaggctgatttccttgatcacggcgccgagcttttccagctccttgacgctgttgtgcaccagctcagcgatacgcgggtcgaggccggcgctgaagtattccttcggcacgccgatgcgcaggcccttgagcgaggcgttcaggctggcgctgtagtccggcaccggctcatcgatgctggtggagtcctgtttatcaaaaccggccataccttgtaacaaaatcgcgcagtcttcagcggtgcgggccagggggccgccctgatcgaggctagacgcataggcgatcatgccccagcgggaaacgcgaccgtaggtcggcttcaggccggtgaggttggtgaacgcggcaggctggcggatcgaaccaccggtatcggtggccgtggcggccggcaggaagcgcgcggcaacggcggcagccgagccaccggacgaaccgccgggcacgtgctccaggttccacgggtttttcaccgcgccgtagtagctcgactcgttggccgaacccatggcgaattcgtccatgttggtcttgcccagggtcacggccccggcggcggccagcttggacaccacggtggcgtcgtagggggctttaaagttgtcgagcatcttcgagccgcagctggtgcgaatgccctgggtgcagaacaggtccttgtgggcgataggcgcgcccagcagcaggccattttcaccgttggcgcgacgtgcgtcggcggccttggcctggctcaaggccagctcttcggtgaggctgatgaagctgttgaccttcggatcgtgctcggcgatacgcgccagcagggtcttggtcagctcttcggaagaaaactttttgtcggcgagaccgcgcgcgatctcggccagagtcatgtgatgcattgcaggctctttccctttagtcgatgactttcggaaccaggtacaggccgttttcgaccgctggcgcgatggactggtaggcctcgcgattattactctcggtcacgacgtctgcgcgcaggcgctggctggcttccagcgggtgagccaggggctcgatgccgtcggtattcacggcttgcatttggtcgaccagcccgagaatgctgttcagggcgtcggtggtctgtggaagatcgccttcattgaggcccaggctggccaaatgagcgattttttccacgtcggagcgttcaagcgtcatgggaatctccagtggaaaacagaacggaggctgtccgtgtgttagattgtcggaacactaccgcatttctacggtcttacggccgcgattgtggggttaggtgcacagaaagtcggccaatttagcacattggcgccttgcccaaaatccctgtcgttgttagagtttgccgcacttttttacccacgcgttgcctagggtccctttcccatgttcaagaaactgcgtggcatgttttccagcgatctttccattgacctgggcactgccaacacccttatttacgtgcgcgagcgcggtatcgtcctgaatgagccatcggttgtggccattcggacccatggtaatcagaaaagtgtcgttgccgtcggcaccgaggccaagcgcatgctcggccgtacaccaggcaatattgctgccattcgtccgatgaaagacggcgtgatcgccgacttcagtgtctgcgagaagatgctgcagtacttcatcaacaaggttcacgaaaacagtttcctgcagcccagccctcgtgtgctgatctgtgttccatgcaaatccacccaggttgagcgtcgcgccatccgtgaatcggccctcggtgccggtgctcgtgaagtgttcctgatcgaagagccaatggcggctgcgatcggtgccggcctgccggttgaagaagcgcgcggttcgatggtggtggacatcggtggtggtaccactgaaatcgccctgatttccctgaacggtgtggtgtatgccgaatccgtccgcgtcggcggcgaccgcttcgacgaagcgatcatcacttatgtacgccgtaactacggcagcctgatcggtgaatccaccgccgagcgcatcaagcaggaaatcggcaccgcctacccgggcggcgaagtgcgcgaagtcgatgtgcgcggtcgcaacctggccgaaggcgtgccacgtgccttcaccctgaactccaatgaagtgctggaagctctgcaagagtccctggccaccatcgttcaggccgtgaagagcgccctggagcaatcgccgccggaactggcttccgacatcgccgagcgtggcctggtgctgaccggtggtggcgctttgctgcgcgacctcgacaagctgctggcccaagagactggcctgccggtgatcgtcgccgaagacccgctgacctgcgttgcccgtggcggtggtcgtgcactggaaatgatggataaacacaccatggacctgctttccagcgaataagcctttgctggtgagcccatgtttcgcccgcaggcagcactttgcagtgctgcctgttggcgtttatcttcttcaatctgcatccaggccggttagatgccgtatgaataaagagaacatttgcctgggaggagcggcttattaaaccgcttttcgccaaaggcccctcattgggcgtgcgcctgttggtgctggtcgtgctttcggtcgcgctgatggtggtcgatgcccgctttgcactgctcaagcccgtgcgcagccagatgtcgctggtgttgatgcagacctactggatcaccgacctgccgcaacgtctgttccagggcgtggccagccagttcggcagccgcaccgagttggtcgccgagaacgaaaaactcaagactgagaacctgctgttgcagggacgcatgcagaagctggcggccctgaccgagcagaacgttcggctgcgcgagttgctcaactcttccgcattggtcaatgaaaaggtcgaagtagccgagttgatcggcatggaccccaaccccttcacccatcgcattatcatcaacaagggtgaacgcgacggggtggtcctcggccagccggtgctcgacgcccgtggcctgatgggccaggtggttgaactgatgccctacacctcgcgggtgttgttgctgacggacaccacccacagcatcccggtgcaggtgaaccgcaacggcctgcgtgcgattgccagcggcaccggcaacccggaacgcctggagctgcgccacgtcgccgacacggcggatatcaaggaaggcgacctgttggtcagctccggcctgggccagcgtttcccggcgggttacccggtggcgacggtcaaggaagtgatccacgattccggccagccgttcgctattgtacgtgccgtgccgaccgccgccctgaaccgcagccgctacctgctgctggtattcagcgacaaccgcaccccggaagagcgtgccaacgacgccgcccaggcccaggaagcggaagacaagcgcaacggtacagcgccgatcgttcctgcaacggtgcccaagcctgcattcgtagggccgcccgcacccgccgctaccccggccgcgcccgtggccacaccggtcaagccggccgcccacaacgctcgcccggccaaaccggcggcgactaaaccaccggccgccacgcctgcagccaagcctcctgcggccgctgcggccaccacgcggcagagggaagaataatggccggtactcattcgcgtaacggttggatcgtctggctgacctttgccatcggtttgttgctcagtgtttcgccgctgccgcagttcatggaaatccttcgcccgctctggctggcgttgctgttggccttctgggcgctgaacctgccgcacaaagtcggcatggtcacggcgatgttcctgggcctggcggaagatgtgctctatggcaccttgctgggccagaacgcgttgatcctgacgttgatcactttcctggtgctgtcgttgcagcaacgtttgcgcatgttcccgatgtggcaacagtgcctggtgatcctggtgatcttcggcctggcgcagttggttcagctgtggctcagcgcgttgaccggcaaccgtcaaccgaccctcgcgctggtgctgccggccctggtcagtgcgttgctgtggccatggatcagctttggtctgcgtgggttgcgtcgtcgctataaaatcaattgaatggattgcgaggctctgcctggttatcgagccctacagggagagtctgcaatgaattcgctttacctggcctcgggctctccgaggcggcgtgaactgttgacccagatcggtgtgcccttcaccgtggtcagcgccgctattgatgaaacccctcttacaaatgaatccgccgtttcctacgtggagcgcctggcgcgcggcaaggcagcggcgggttttgctgtgctcccaaatacgtctggcgcctgtgtgctgggggctgatacggctgtgatcgttgacggtcagatcctcggtaagcccgttgaccaggccgacgccttggcgatgttgatggccctggcggggcgtgagcacgaggtactcaccgccattgccctcaccgacggccagcgctgcgagattgtttgtgtaagtagtcgtgtacgttttcgcgacatttctgtcgaggaggctacaacctactggcacagtggcgaaccccaggacaaggcgggcggctatgctatccaaggcctgggctcggtgtttgtggccgggctcaatggcagttattcggcggtagtcggcctgccggtgtgcgaaaccgcacaactgctccatcaattcggcataccctgttggcaaaatcttaccgcgcgctgatcgccgttccccagcgcccagccttaagcgattggtcactattgtgaaaacgcctgaacgagacccagccatgagtgaagagattctgatcaatatcacgccgatggaatcgcgcgtggcggtggtagagaacggtgttctgcaagaagtgcacgttgagcgcacccagaagcgcgggatcgtcggcaatatctacaaaggcaaggtggtgcgcgtattgccggggatgcaagcggcattcgtcgatatcggtctggatcgtgcggcatttatccatgcttcggaaatttccctgcgtgaaggccctgctgtggaaagcatcagcgcgctggtgcatgaagggcagagcctggtggtgcaagtcaccaaggaccccatcggttccaagggcgcgcgcctgaccactcagctatcgataccatcgcgttacctggtgtacatgccgcggaccgcgcatgtcggcatttccttgaagatcgaagacgaagccgagcgcgagcgcctcaagaaggtggtcagcgactgtgtggccgccgaaggcatcaaggaagcaggcgggtttatcctgcgcaccgccgctgaaggcgccggcgccgatgaaatcctcatggacatccgctatctgcggcgtctgtgggatcagatcggtgcccagatcaagaccatcggtgcgcccagcgtcatctatgaagacctgggcctggccttgcgcacactgcgcgacctggtcagcccgaagattgagaaaattcgcatcgactcgcgggaaaccttccagcgcaccacacaatttgttgccgaactgatgccggaaattgccgatcgcctggagcactaccccggcgagcggccgatcttcgacctgtatggcgtcgaagatgaaatccagaaagccctggaacgcaaggtgccgctcaagtccggcggctacctggtggtggacccggcggaagccatgaccaccatcgacgtcaacaccggcgcgttcgtgggccatcgcaacctcgaagaaaccatcttcaagaccaacctcgaagcggcgaccgcgattgctcgccaactgcgcctgcgcaacctgggtggcatcatcatcatcgacttcatcgacatggaagacgaagagcaccagcgccaggtgctgcggaccctcgagaaacagctggagcgtgatcacgccaagaccaacatcatcggcattaccgagttgggcctggtgcagatgacccgcaaacgcacccgcgaaagccttgagcaagtgctgtgcgagccgtgcagcagttgccaggggcgcggtaagttgaagaccccggaaacggtttgctacgagattttccgcgaaatcctgcgcgaggcgcgtgcctaccaggccgaaggttatagagtgctcgccaaccagaaagtggtcgaccggctgctggacgaagagtctggcaacgttgccgaactggaaggctttatcgggcgcacgatacgcttccaggttgaaaccatgtattcccaggaacaatacgacgtggtgctgctctgatccccattcgctttccttttatgagacaggcaggccttgatctgccgttcgactactgccttgagggtcgcctgacatggagcgtctgatacgcttttttgccgctttgacccgttgggggctgggcctctgtgccttgttgctggtgctggcggcggtgtacgtgagcctggggcgtgaattgactccgttggtggccgagtaccgcgccgaagtcgaagccaaggcccaggcagccgtggacatgcctttgcatatcggcagcctcgaaggccgctggagcggctttgcgccggtattgctggcccatgatgtgatggttggcgagggcagcagtgccttgcgcctggaccaggtcgaagtggtgcctgatgtctgggccagtctgatggcccgcgaagtgcgcattgcccacctgcaagtcagtggcctgcaactcagcgtcaaggaagacaaggacggcaagtgggccttgcaaggcctgccggtgcaggacgaccagccgctggacccggagcagttgctcacgcagatgcagaaggtcaagcgcgtgtcgctgctcgacagccaagtgacgctgcaaccgttcgaccaggcgccggtgaccctgacgtatgtcggcctgagcctgcacaccggcgtcacccgccaacgcctggatgcacgcctgaccctgcctgacggccagcccctcgccatgagcctgcgcacccgcattcgcgccagccagtggaaggacggggaagtccaggcttatctgagcctgccccagagtgattgggccaagtggatccccgcaaaactgactcaacagtggaagctcacgcagttcaaggcgggcggtgagttctggctgacctgggccaaaggcactgtgcaaagcgcagtagtgcgcctcaactcgccacaggtgaagggccactacgccgagcgcaagccggtgcatatcgaaaacctcgcgcttacggcctacctgcaacgcagtgacaccggcctcagcgtgctgttcgactcactggcgatgaatctgggcgagacccgctgggaatcacgcctgcagttgcagcagaccctggccaccgacaaggacctggaagtctggaagctccaggccgaccgcctggacctgacgcctatcacaccattgctcaatgcgctggcgccgctgccggaaggttttgccaagacggtcgagcacctcaaggccactggcctgctgcgtaatgtgctggtggacttccgtccccaggacacgaccgataagaaggtcagcttcgccgccaacctcgaacgcatcggcttcgatgcctacttcggcgcaccggctgcgcgtaacgtgtccggcagtatcagcggcgacctgggccagggcgagttgcgcatggacagcaaggacttttccctgcacctcgacccgatcttcgccaagccctggcagtacctccaggccaatgcacgcctgacgtggaagctggacaaagaaggcttcaccctgatcgccccttacatcaaggtgctgggcgaggagggcaagatcgccgccgacttcctgatccgtctgcatttcgaccacaaccaggaagactacatggacctgcgggtcggtatggtcgatggcgacgggcgcttcacccccaaatacctgccggcggtgttgagccccgccctggatgaatggctgcgtaccgcgattctcaagggcgcggtggatcaaggcttcttccagtatcagggttcgttgaaccacgatgcgctgccggcttcacgcaatatcagcctgttcttcaaggtgcatgatgccgagctggcgttccagccgggctggcctcatgtgagcaaggtcaacggcgaagtgtttgtcgaggagagcggtgtgcgcatcctggccagcaagggccagttgctcgataccaaggtcaaggacatctacgtcaatattccccacgcagctgcgggcaaagacagccatctattgctcacgggcggttttgccggtggcttgggtgatggcctgaaaatcctccaggaagcgccgatcggcactgcatcgacttttgccggctggaagggcgagggtgacctgcaaggcagccttgacctggatattccgttggccaagggcaccgaaccaaaaatcgtggtggacttcaaaaccgacaaggcgcgcctgcaattggccgagccgcccctggacctgacccagatcaagggcgagttccgtttcgacagcgccaagggcctcagtggccagaacatcaccgcccaggcgtttgatcggccgatcactgcgcagatcgttgccgatggcaaaccgggcaatatcagcacccgtgtgaatgccaagggccaggtaacggtcaagcggctgacggactggttgaaaatcagccagccgttaccggtgtccggcgatattccttaccagttgcaggtgaccctggatggcgccgacagccaactgatggtcagttccaacctcaagggcgtggccgttgacctgccggcgccattcggcatgccggccagccaggggcgtgacagtgtgttccgcatgaccttgcagggtgccgagcgccggtactggtttgattatggcgagctggccaactttacctttgctgcgccgccggacaaattcaatgacgggcgcggtgagttgttcctcggtgatggcgatgccgtgctgccgggtgccaagggcttgcgcattcgtggggtgttgtcggagctggacatcgatccgtggaagaaactggtggatcgctatgcgggcaatgacccgggcggcagtgccaagcaattgctcagcggcgctgacttcaaggtgggcaagctgaccggttttggcacccagttcgatcaagtcagtttgcaacttgaccgtaagccagcggcgtggggcttgcagctcgacagccagcaggccaagggtacggtcaacctgccggacgccaagggcgcgccgattgcgatcaacctgcagtacgtgaagctgccggcggtggacccgacggtacaggcggatgaaaacgcgccggaccccttggcgaacatcgaccccaaggatattccagcgctggatatcgccatcgaccagttgttccagggcccggacctgatcggcgcctggtcgctgaaaatccgcccgaccgccaagggcctggccttcaacaacctggatctgggcctcaagggtatgcagctcaagggtgcgggtggctgggagggcgcggcgggagacagcagcagctggtacaagggccgcctggatggcaagaatattggcgatgtactcaaggggtgggggtatgcgccgaccgtcaccagccaggatttccatctggatgtggacggacgttggcctggttctccggcctatgtagggcccaagcgtttctccggcagcctggatgcggcgttccgcaacggccagttcgtcgaagtggagggcggagcccaggccctgcgggtattcggcctgctgaacttcaactccatcgggcggcggttgcgtctggacttctccgacttgctcggcaagggtttgagctatgaccgggtcaaaggcctgctggccgccagcaatggcgtgttcgtgacccgggagccgatcaccatgactgggccgtcgagcaacctcgaactcaacggcaccctggacctggtggctgaccgtgtcgatgccaagctgctggtaacgctgccggtgaccaacaacctgccgatcgcggcgttgatcgtaggtgcgccggccattggtggcgcgttgttcctgatcgacaagttgatcggtgaccgtgtttcacgcttcgccagtgtccagtacaaggtcgaaggcccgtggaaagacccgaaaatcaccttcgacaagccatttgaaaagccaaactgagaggctgtggagtagcatggtgccatgccctttatggagtgttggcccatgtcctttgcggtaattcaaatggtcagccagagtgacgtgctggccaacctggcccaggcccgtcgcttgctggaagaagccgcggccggtggtgcgaaactggcagtgttgccggaaaatttcgccgccatgggccgtcgtgacattgccgatatcggccgtgccgaagcgctgggcgaaggcccgatcctgccgtggttgaaacagaccgctcgcgacctcaccttatggatagtggctggtactttgccattgccgcccaagggccaaccgcacgccaagtccaacgcctgctcgctgctaatcgatgatcagggcgaaatcgtcgcccgctacgacaagctgcacctgttcgatgtggatgtcgccgatgctcgtggtcgttatcgcgaatccgacgactatgctttcggaggtaacgtggtggtggcggacacgccggtcggccgtttgggcctcacggtgtgctacgacctgcgcttccccgagctgtacagcgaattgcgtgctgcgggggctgaattgattacagcgccgtcggcgtttacggcagtgaccggcgccgcgcactgggacgtgctgattcgcgcacgggccatcgagacccagtgctacctgctggcggctgcccaggggggtgtgcatccggggccacgggaaacctacggtcacgcggcaattgtcgacccctgggggcgcgtgctgacacaacaggatcaaggcgaagcggtgttgctggccgaacgcgatagcagtgaacaggcgtcgatacgggcgcgcatgccggtggtcaaccatcggcgctttttctcgcagggcgcacagcggcctgcttcggaacgatgaatttaaggccatacctatgagcgagttgttgtcctcagtcagtgatcacctcctggcgcccggtggcgtgaccatcgaaagcttgcaaaccgtgctgggcgatctcgccggtccgggcatcgacgcggccgacctgtatttccagggccagatttccgagtcctgggcactggaagacggcatcgtcaaggaaggcagtttcaacctcgaccagggtgtgggcgtgcgggcgcaatccggtgagaaaaccggttttgcctacagcaacgcgataaccctggaggctttgggcctggccgcacgtgccgcacgctcgatttcccgcgccgggcagaacggcacggtgcaggcgttcagcacgcaggacgtgacccagttgtacgggccggataacccgttggaagtgatgacccgtgccgagaaagtcgacttgctcaagcgtgtcgatgccgcgacccgtgcattggacccgcgtatccagcaggtcaccgtaagcatggccggcgtgtgggagcgcatcctggtggcgtccaccgacggcggcctggcggcggatgtgcggccgctggtgcgtttcaacgtgagtgtgatcgtcgagcagaacggccgtcgcgagcgcggtggccatggtggcggcgggcgtaccgactaccgctatttcctcaccgacgaccgtgccatgggttatgcgcgtgaagcgctgcgccaggcactggtcaacctggaagccattccggcgccggcgggtacattgccggtggtgctgggctcgggctggtccggcgtgctgctgcacgaagcggtcggccacggcctggaaggtgacttcaaccgcaagggcagttcggcctacagcgggcgcatgggggagatggttgcgtccaagctctgcaccatcgtcgatgacggcaccctggccgggcgccgtggttcgctgagcgtcgacgacgaaggcacgccgaccgagtgcaccaccctgatcgaaaacggtgtgctcaagggctacatgcaagacaagctcaacgcccgtctgatgggcgtggcgcgtaccggtaatggccgtcgtgaatcctatgcgcacctgccgatgccacgcatgaccaacacctacatgctgggtggcgaaagcgatccggctgaaatcatcgcctcggtgaagcgcggcatctactgcgccaacctcggtggcggccaggtggatatcaccagcggcaagttcgtgttctccaccagcgaggcgtacctgatcgaagacggcaagatcactgcgccggtcaaaggcgcaaccttgatcggtaacggtccggaagccatgagcaaggtgtcgatggtcggtaacgacctgtcgctggacagcggcgtgggcacatgcgggaaagatgggcagtcggtgccggtgggtgtcggccagccaacgctgaagattgatgcgatcaccgtgggtggcacggggtcgtaagcggtggagcttcgggtggcgaaggccgccacccggggaagggcatcaacgcaggccgcgttgagtctcgtccagctcacggatgtacttgaagattttacggctggtggccggcgccttgttatgcgccagctcgtgctgggcctgacggatcagggagcgcagttgctggcggtccgcatccgggtagtccagcacgaatttctccagcaccgcgtcatcgcccgagatcaggcggtcacgccaacgttccaggttatggaaacgttcgttgtactggcgagtggaggcatcggtttgatcgagcaaagtcagaatggcgtcgatgtcctggtcgcgcatcagcttgccgataaacgagatgtgccgtttgcgcgcgatattcgcggtgtgcttgggcgcatcggccagggctcgacgcatttcgtcggtcaaaggcagttttgcaatcaaatcttttttgagcgttgtaaggcgctcgccgaggtcaaccaacgcatgcagctcgcgtttgacctgggttttgcttttctccccatcgagggagtcgtcgtaagaatcaaccatggtggcagtccgcaaagaaacgccgccatgataaccagtcgggggccgcttgtccggcccggtcgctcgatggccttaaccgaaagcagaatttgagtggagaaaaccatgagtgcagcccaaagcgtcggtccgcaagcgttaccggcactgcaggaacaagtcgagcagatccttgccgaggccaagcgccagggggccagtgcctgtgaggtggcggtgtcgctggagcaggggctgtcgacgtcggtgcgccagcgggaagtggaaactgttgagttcaatcgcgaccagggctttggtatcaccctgtatgtggggcagcgcaaaggttcggccagtacctcggccagtggtccggaagcgattcgcgagacggtcgcggctgcgctggcgattgccaagcatacgtccgaggatgaaagctcgggcctggccgacaaggcgctgatggccaaggacttgaaagactttgatctgttccatgcctgggacatcacaccggaacaggctatcgagcaggcgctgacctgcgaagccgccgcgtttgaagctgatgcccgcatcaagaacgcggatggcaccacgttgagcacgcatcagggctgccgcgtatatggcaacagccatggtttcatcggtggctacgcgtccacgcggcatagccttagctgcgtgatgatcgccgaagcgaatggccagatgcagcgcgattactggtatgacgtgaaccgccagggcgatttgctggccgacccggtcagtattggccagcgcgctgcgcagcgggcggcgagccgcctgggcgcgcgcccggtaccgacctgcgaggtgccggtgttgttttcggcggagttggccggaggcttgttcggcagtttcctgggggcgatttccggcggcaacctgtaccgcaagtcgtcgttccttgaaggcgcgatcggccagaagctgttccccgaatggctgaccatcgacgagcgtccgcacctgatgcgcgccatgggcagttcagcgttcgacggtgatggcctggccacctatgccaagccgtttgtcgagaagggtgagttggtgtcctacgtattgggtacttacgccggtcgtaaattgggcctgccaagcaccgcaaactccggtggcgtgcacaacttgttcgttacccatggtgatgaggaccaggcggcgctgctgcggcgcatggggcgtgggctgctggtgaccgagttgatgggccatggcctgaatatggtgacgggcgactactcccgtggcgcagcggggttctgggtggaaaacggcgagattcagtttgccgttcaagaggtgacgattgccggcaacatgcgcgatatgttcaagcagatcgttgccgtcggaaatgacttggagttgcgtagcaatatccgcacgggttcggtgttgatcgagcggatgaccgtcgccggcagctgatccttcagacgcgcttcaacaagaaggcgcgccatctttatagatggcgcgcctttttttgtggtggcgtttcaggaggattgtcctgccacacttgttttgattctcaatatcatttaataataaatatcattaccgaatgagtgtggatcatgagttctgtcctgcatgaggatccttacctggagagctggcgctggatgagtcgccagattcgttgcggcctcgaccccaacgagccgcgcctgatcgaacactacctcaacgagggccgatacctggcgtgctgcaccgcgacccatccgtggacgatcgctgaaacctcattccgcctgttgctcgacaccgccagcgatatcgcgctgccctggcattggcgttccctgtgcctggaccaggcctggcgcccgctgcgcgacctggaaaaactctcccactgtgcctgccgcctcaagcgctggcagagctttgcctggcaattggcgacctgcgaattgctgccgtctatttctcactccgaccttgttcaaggatctaacgatgagtaacacccgtatcgaacgcgacagcatgggcgagctgcaagtgcctgccgaggccttgtatggcgcacaaacccagcgagcggtgaacaactttccgatcagcaatcaacgcatgccggcgcaattcattcgtgccctgatcctggccaaagctgcggcggccaaggtcaacgtcgacctcaagcaaatcagcgaaagccagggcaaggcgattgtcgatgccgcccagggcttgctggaaggcgacttcatgcagcacttcccggtggacatcttccagactggctccggtaccagctccaacatgaacgccaacgaagtgattgcgacccttgccagccgcttgctgggtgagccggtcaaccccaatgaccacgtgaattgcggccaaagcagcaacgacatcattccgaccactatccacgtcagcgccgcgctggtgctgcatgagcaaacattgcccgcgctgttgcatctggtgcaggtgatcgagcagaaagccgaggaagtccacccgttcatcaagaccggccgcacgcatctgatggacgccatgccggtgcgcatgagccaggtgctcaatggttgggcgcagcagctcaaggccaatatcgggcatttgcaggaccttctgccgagtttgcaagccctggcccagggcggtactgcggtcggcaccggaatcaatgcacacccggaattcgcggtgcgtttcagtcagcagttgagcagcctgaccggtgtgaaattcaccccgggcaagaacctcttcgcgctgattggctcccaggacacggccgtcgctgtctccgggcagttgaaagccaccgccgtgtcgctgatgaaaatcgccaacgacctgcgctggatgaactccggcccactcgccggcctgggggaaatcgagctggaaggcctgcagcctggttcgtcgatcatgcccggcaaggtcaacccggtgatccctgaagccaccgcgatggtggccgcacaagttatcggcaacgacacggtcatcaccgtcgccggccagtcgggcaacttcgaactgaacgtgatgctgccgatcatcgccaataacctgatcagcagcctcgagttaatggccaactccagtcgtttgctggcggacaaggccattgccagcttcaaggtcaatgaggccaagctcaaggaagcgctgtcgcgcaacccgatcctggtcaccgcgctcaacccgatcatcggttaccaaaaggctgctgaaattgccaagaaggcctatcaacagggccgtccggtgattgatgtcgcccttgagcacaccgacttgccgcgcagtcaactggaaatcctgctggatccggaaaagctcacggccggcggcgtgtaatcaccgactctgctttggaggctcaccatggagcactggaaacgcacgatcgaacgggccaatcgctgctttatggcgggtgaattggttgacgctcgcgaggcttacttgcaagccctggccctggcccaagtgctgttcgaacgctgggcggatgccgacgaagcagtggcggcttgcgtcatttcccatcacaacctggcggacctgcacctgcggctgaaccagccggaagaaagcgcggaatacctttgcgctatccaccagcgtcttttgcagaccatgcaggacccgcgcctgagcccgcagttgcgggaggcggcgctgcgccagagcagcaaaacctacgtcgaactgttgaatttcatcagcgatcacggcgaataccctcgcactcatcgcttgctgggcagtactgcagtgcagcccgccacgccccactacggagcccattgatatgacttacaccctgcctgccttgccttacgcgtatgacgccctggaaccgtatatcgatgcgcaaaccatggagattcactacaccaagcaccaccagacctacatcaataacctcaacgcagcggtcgaaggcaccgagttcgcgggctggccggtcgagaaactggtgtccagcgtgcagcaactgccggaaaaactgcgcgcagcggtgatcaatcagggtggcggccatgccaaccattcgttgttctgggcggtgatgtcgcccaagggaggtggcaagcccgaaggcgtgctgggtaaagccatcgacgaacagctgggtggtttcgacagcttcaaggaggctttcaccaaggctgcgttgacgcgcttcggcagcggctgggcctggttgagcgttaccccgcaaaagaccctggtggttgaaagtagtgggaatcaggacagtccgttgatgaacggcaataccccgatcctcggcctggacgtctgggagcacgcctactacctgctgtaccagaaccgtcgcccggaatacatcaacgccttctacagcgtcattaactggccggaagttgctgcccgctatcaggccgcggtggcctgacattcaccttcataacaagacctaaggccgactatgggcactgaaacactggcgatcagcagcggacgaatgtttcgttatgcatttggctcgctgctgctattggcaggtactgcattgctggtggcccacgggctggcctggctgaacctggaaccgcgcatcctgcgcgccctgcaaggcggctccatttgcgcgctgggtacggcgctgggcgcggtcccggtactggtgatccgacgcatgccggtggcgctgagcgatacattactgggttttggcgctggggtgatgctggcggcgacggcattttcgctgatcgtgccgggcattgccgcggctgaaagcctggggctctcgccgtggggtgctagcggcttgatcagctttggcatcatgctgggcgcattcgggttgtacctggttgaccgcaaggtctccggtgccagcccggaaatgctgatggggacgccagacaagccggtgatcccgccgcgcatctggctgtttgtgtttgccatcatcgcccacaacatccccgaaggcatggcggtaggcgtttccgccggtggcggcatgcccgatgctgacagcttggccatgggcattgcgttgcaggacgtacccgaaggcctggtgattgcgttggtgttggccggggcggggatgtcgcgggtcaaggcgttcctgatcggcgctgcatcaggcctggtggagcccgtattcgctgtgctctgcgcctggctggtcagcctggccgaagtgctgttgcctttggggttggccctggctgctggcgcgatgctgttggtggtgacccacgaagtcatccccgagtcgcgacgcaatggtcacgaaaagctcgccagcctgggcctgtgcatcggtttttgcttgatgatggtgatggacaccgctctggggtaggttacgtctactgtaggagcaagcaagctcgctcctacagggggttattcaccttcgtcgaagtaattgttgatcagcgccgccagcgctgccatcgcttcgtcttcctgctcgccttccgtcttcaagtgaatcctggtgcctttgccggccgccaacatcatcatggccatgatgctcttgccgtcgaccatggattccggtgtacgcccggcgcggatctggcaggggaactgccctgctacgcccacgaacttggctgaggcgcgggcgtgcaagcccagcttgttgatgatttcaatttccagagcgggcatcgcgggggtgttcctttcagctaaggtcgcggtggcggacctggacgttcttgagggtttgttgcagcacctggcccaggcgctcggtcaggtagacggagcggtgatggccgccagtgcagccgatggcaatggtgacataggcacggttgcttgcagcaaagcgtggcagccatttgagcaagtaggaggagatatcctggaacatctcctccacatccggttgcgctgccaggtaatcggccacgggctgatccagcccggactggtcacgcagttccggtttccagtacgggttaggcaggcagcgcacatcgaacaccaggtcggcgtcgaccggcatgccgcgtttgaacccaaatgactccacgagaaacgcggtgcccggctctggctggttcagcaggcgcagcttgatagcatcgcgcaactggtaaaggttgaggctggtggtgtttatcttgaggtcggcgaggtcaatgatcggccccagcagcttggtttcgtcttcgatggcttcggccagagagcgatgggggctgcttagggggtgacgccggcgggtctcggagaagcgtttgagcagggtttcttcgtcggcgtccaggtacagcacgtcgcaatgaatgtgcttgccccgcacttcctcgagcaattgcgggaatcgctcaagatggctgggcaggttacgggcatcaatcgaaacggcgaccagcggttgggccagttcggtatggatcaaggcgcgttcagccaactccggcagcaggccggcgggcaggttgtcgatgcaatagaaaccgttgtcctcaagaacgttgagggcggtgcttttacccgagccggagcggccgctgacgatgatcaagcgcatggttactgcccgttctgttcatccaggacaacctggtacaacgcctcattgctgctggcgctgcgcagtttgtcgcgtacttccttgcggtcgagcatgctggcgatctgccggagcagttccaggtgcgcatcggtggcggcttgcgggaccagcagaacgaacagcagatcaaccggggcgccgtcgatggcgtcgaaatcgatgggggcttccaggtgcagcagggcgctgacaggtgtttcgcagcctttgaggcggcagtgaggaatggcgatgccgttgccaaaaccggtggaaccgagtttttcacgggcaatcagcgcatcgaagacatcttgcatctccagatccggcacttcgcgtgcgatcaggttggcaatttgttcgagggctttcttcttgctgccacccggcacgttcacgagggaacggccgggggtcaggatggtttcaagtcggatcatggggggagagttaacgacctgtaccttgcatcaggtgcagattcttttccttatgctttatgagttggcggtccagcttgtcgtagagcgagtcgatcgccgcgtacatgtcttcatgttccgcattggcgacgagcttggcattcggtacgtgcagggtggcctcgattttctgcttgagcttatcgacctccatgatgacctgcacgttggtgatcttgtcaaaatgccctgcaagcttgttcaacttgctttcggtgtactcacgcaggggcttggtcacttccagttggtgtccactgatgttgacttgcatacagcttctccttcgttgccagtgcataaagcggcaggcaaaggcgcctgccactggaacgctgtggcccgcccgtcacatcaaacgcttacgctcgctggaaggcgcgatcccaagggactcgcggtacttggcgacggttcgacgggcgacctgaatgccttgtgcctccagtaaaccagcgatcttactgtcactcaatggctttttctgattttccgccgcaaccagttttttgatgatcgcgcggatcgccgttgacgagcattcgccgccttcggaggtgctgacgtggctggagaaaaagtatttcagttcataaataccccgtggggtatgcatgaatttctgcgtggtcacgcgtgaaatggtcgactcatgcatgcccaccgcttcggcgatgtcatgcagtaccagcggcttcatcgcctcgtcgccgtattccaggaagccgcgctggtgctcgacgatctgggtggcgactttcatcagggtttcgttgcggctttgcaggctcttgatgaaccagcgggcttcctgcaactggttgcgcatgaaggtgttatcggcgctggtgtcggcgcggcggacgaaaccggcgtattgcgggttgacccgcaggcgtggcaccgactcctggttcagctccaccagccaccgctcgttgtccttgcgcacgatcacgtcggggacgacgtattcggcttcgctggactcgatttgcgagccggggcgcgggttaaggctctgtaccagctcgatgacctggcgcaggtcgtcttccttgagcttcatgcggcgcatcaactggctgtagtcgcggctgcccagcaggtcgatgtagtcggtgaccaggcgctgggcctcggcgagccatggggtcttggccggcaactggcgcagttgcagcagcaggcattcgctgagggtgcgcgcgccgataccggatggctcgaactgctggatgcggtgcaggacggcttcgatctcgtccagttcgatatccagttcggggtcgaaggcttcaagaatttcttcaagcgtctcgtctagataaccctgattgttgatgcagtcgatcagggttacggcgatcaggcgatcggtatccgacatcggtgccaggttcagttgccacagcagatggctctgcaggctctcgccggcggaggtgcgggtggtgaagtcccactcgtcatcgtcattgctgggcaggctgctggcgctggtctggtagacatcttcccaggcggtgtcgaccggaagctcgttgggaatgcgttcgttccattcgccttcctcaaggttgtccaccgtgggggcggtttcctggtaggagggttcctgcacgtcggaattgggtttttgctcgatgttatcggccagcgggtctgcattatcgaagtcgtcgccttcttcctggcgttcgagcatcggattggactccagggcctcctggatttcctgttgcaggtccagggtcgacaattggagcaggcggatggcctgttgcagctgcggtgtcatcgtcagctgctggcccattctcaggactagcgatggtttcatggcaggggcttaacaccttattcgccggcgcaatgcgccatccacgacagggcgcgtgagcgccaaacataagcaaattatatgcctgatgtcgggtgctttgcctagagcgcggtaacaataaaaatccggaggttttcattgactcccgcgcaccttggcgaacgccgtgacaccacggtgtttacaggcggaactcgtgacccaggtacacttccttgaccagttcattggccaggatggtagcggaatcaccttcggcaatcagttggccgtcattgacgatataggcggtttcgcagatatcgagcgtctcacggacgttgtggtcggtgatgagcacgccaatgcccttggccttgaggtgatggatgatctgcttgatgtcgccgaccgaaatcgggtcgacgccggcaaacggctcgtccagcaggatgaacttgggggcagtggccagtgcgcgggcgatttccacgcgacgacgctcaccaccggacaggctcatgccgaggttgtcgcggatatggttgatatggaactcctgcaacaggctttccagctccttgcgacggccgtcacggtcgagttccttgcgggtctcgaggatcgccatgatgttgtccgacaccgacagtttgcggaagatcgacgcttcctgcgggagatagccgataccggcccgtgcgcggccgtgcattggctggtgactcacgtccaggtcatcgatcaggacacggccctgatccgcctggaccagaccgacgatcatgtagaagcaagtggtcttgccggcgccgttggggccgagcaagccgacgatctggccgctgtcgatcgacaggctgacgtcgcgcacgacctgacggcttttataggccttggccagatgctgggctttcagggttgccattactcggccttcttcttcggctggataaccatgtcgatgcgtggacgaggcgcggtgaccttgttgccattggcacgaccggcattagcgatctgtttcacggtgtcataggtgatcttctcaccttccgtggagttgccatcggggctgagcaccttggcctggtcaatcagtacgatgcggttctgctgggcgtggtactggatggtcttgccgtagcccttcatcgggccggtgtcggtcgcggactgcttctgttcgaagtaagccaggttgcccaccgaggtcacgacatcgatgtcgccggttttggtgcgcgttagcgtcacggtattgccggtgattttcatcgagccctgagtgatgatcacgccaccggtgtaggttgcgacgccttgcttgtcatcgagctgtgcatcatcggccgagatgtggatcggctgctggctatcgttcggcagagcccaggcgctcacgcttcccagtgctgcgcccaggccgagcaaaatagggagagttttaacgagcctcatactgtcctcttacgttcgatagcaggtgtatcctgctttctttcaaatacgctttcattcccttgccagtcgatacaccgccagcgccgtcgattctaacgtcttgctcggtctgcgcatattgcttctgcgggaatacggtcatgcgactgctggtaatcaccgtctcacggcttttatcgtcagtgcgcgcaatgcgcaccgagtcgatcagttccacctcggtaccgtccgggttgacctcgccacgcttgctggtgacgtgccatgggaactcggtaccgcggtaaatgttcatgtccgggttggtcagcagggtgacctcggtggccttcacatgctcgaccttgtccgaggtcatttcgtactgcaccttgccgtcaggcaggaactgcacacttttggcattgatggcgtaatagtcgatagcgccttcgtcaacctgcgcagcaggctggtcgagaaagcgctccgggctgatattccagtagcccaccgcgaggaacagcgcggcgatgaccccgaataacaggaagttgcgaatctttttgctcagcataaaacgctctataagtaggcggcgtgtgccgcttcaaggctgccctgggcacgcaggatcagctcgcagaactcgcgggcggcaccttcgccaccgcgggcgctggtgatgccgtgggcgtgttcgcgaacaaacgccgccgcattggcgacggccatgcccaggcctactcggcgaatcaccggcaggtctggcaagtcatcacccaagtaggcgacctgctcatagcttaggttgagttggccaagaagctcgtccagaaccaccagtttatcctcgcggccctgatacaggtgaggaatccccaggttttgtgcgcgacgttccacaacgggcgtttttcggccgctgataattgccgtttgcacacccgccgccatcagcattttgatgccctggccgtccagcgtgttgaatgtcttgaattcgctgccgtcttcgaggaagtacaggcggccgtcggtcagcacgccgtcaacgtcgaaaatcgcgagtttgatatttttgccgcgttgcaacaggtcgctggtcatctacatcactcctgcacgcagcaagtcgtgcatgttcagggcgccaatcgggcggtcgtcgccatcaaccaccaccagcgcgccgatcttgtggtcttccatgatcttcaaggcttcggctgccagcatctctgggcgtgcggtcttgccgtggggtgtcattaccgcgtcgatggtggcggtgtggatatcaatcgtgcggtccagggtgcggcgcaggtcgccgtcggtgaagaccccggccaagcggccatcggcctccaggatcaccgtcatgcccaggcccttgcgggtcatttccatcagcgcatccttcagcaaggtgccgcgctggacatggggcaactcctcgccggagtgcatgacgttttccactttcagcagcaggcggcgacccagggcgccacccggatgggaaaacgcgaagtcctcagcggtaaacccgcgggcttccagcagcgctacggacaaggcatcgcccatgaccagcgcggccgtggtggaggaggtcggtgccaggttcagcgggcaggcctcgtggtccacgtggacgttcaggttgacttcggcggccttggccagcgtcgactccgggttgccggtgatgctgatcatctggatgcccaggcgtttgatcagcggcagcagggtaacgatttcgttggtagtgccggagttggacagcgcaaggatgatgtcatccttggtgatcatgcccatgtcgccgtggctggcttcggccgggtgcacgaaaaacgcggtggttccggtactggccagggtggcggcgatcttgttgccgacgtggcccgacttgcccatgccgaccaccacaacgcggcccttgctggccagaatcatctcgcaggcgcgtacgaaatccgcgtcaatatgggccagcaagccttctacggcttcaagctcgaggcggatggtgcgttgtgcggattgaataaggtcgctggattggctcatgtctgaaatcgtatagcctgacgaaaagtcggcgattatagcggtaatgatcaattccctcacgcaagttcgtcagggtttgttcgcaatgtgcctgagattcaaccccagcaacgatttttccctgtccccaatctgaacaagcactgttccggccttgggcgccttgtaccagcagtgatatagttcgccgccagttcggtccgcccagcccacgtggccaactattgcgcaacggttgcaaacgtttgtcgcaagcgtggtgtctgagtgagaggctgcatcccaaggagtttagatgagtgccgataacgcctacgcggtcgagctgaagggactgaccttcaagcgcgggacgcgcagcatcttcaataacgtcgatatccgcattccgcgcggcaaggtcacgggcatcatggggccttccggttgcggcaagaccacgctgctgcgcctgatgggcatgcaattgcgccccagtgcgggagaggtgtgggtcaacggccagaacctgccgacgctgtcgcgcagcgatctgttcgatgcacgcaagcacatgggtgtgctgttccagagcggtgcgctgttcaccgatcttgatgttttcgagaacgtggcctttccgctgcgggtgcatacccagctgtccgacgagatgattcgtgacattgtgttgctgaaactgcaggccgtaggccttcgcggcgccatcgacctgatgcccgatgaattgtctggtggcatgaagcgccgtgtggcgctggcgcgtgccattgccctcgacccgcagattctcatgtacgacgagccctttgtcggccaggaccccatcgccatgggcgtgctggtgcgtctgatccgcctgctcaacgatgcactgggcattaccagcatcgtggtctcccacgatcttgcagaaaccgcgagcattgccgattacctctatgtagtgggcgatggtcaggtgctggggcagggcacgcccgaagagctgatgaacgccgacaacccgcgcattcgccaattcatgaccggcgatcctgatggcccggtgccttttcactttccggcagcggattaccgctcagatcttctggggaagcgctgatgcgcaagacatctcttatcgagaaggttcgccttttcggtcgctcgggcatcgacatcgtcgaagtgctgggtcgttcgacgattttcctgttccacgccttgctcggccgcggcggtattggcggcgggttcggcctgctggtcaagcagctgcattcggtgggcgtgatgtccctggtgatcatcgtggtctccggggtgttcatcggcatggtgctggcgttgcagggcttcaatattttgtccagctacggttcggagcaggcagtggggcagatggtcgccctgacgctgttgcgtgaactggggccggtggtgaccgccttgctgttcgccgggcgcgcgggttccgcgttgaccgccgaaatcggcaacatgaagtccaccgagcagctgtccagtctggaaatgatcggcgtggacccgctcaagtacattgttgccccgcgcctgtgggccggcttcatttccctaccactgctggcgatgatcttcagcgtggtcgggatctggggcggttcgtgggtggcggtggactggctgggcgtctacgacggctcctactgggccaacatgcaaaacagcgtgaccttcagcggtgacgtgctcaacggcatcataaagagcatcgtcttcgcctttgtggtgacctggatcgccgtattccaaggctacgactgtgagcccacttcagaagggatcagtcgcgccaccaccaagaccgttgtgtacgcctcgctggcggtactgggccttgacttcattttgaccgccttgatgtttggagatttctgatgcaaaaccgcactgtggaaatcggtgtcggccttttcttgctggctggcatcctggctttactcttgttggccctgcgcgtcagcggcctgtcggccagccccaccgccgacacttataaactttacgcgtacttcgacaatatcgccggtttgactgtcagagctaaagtgaccatggccggtgtgaccatcggcaaggtcacggcaatcgatctggatcgcgacagcttcaccggccgagtgacgatgcagctggacaagaaggtagataatctgccgactgactcaactgcatctatcctcactgcgggtctgctgggcgagaaatacatcggtgtcagcgtgggtggggaaacagccctgctcaaggatggctcgacaatccacgacacacagtcgtcgctggtacttgaggacctgatcggtaaattcctgcttaatacggtcaataaagacgccaaatgaggaatctgttcatgatctctaccttgcgacgtggcctgctggtgctgttggcagcgctgccgctgatggctaacgcggcaggttctgcgcacgatctggtgcaggacacgaccagcaaaatgctggctgacctgactgccaataaagagcagtacaagcaagatccgagtaagttttacaacgcgctcaacaccattgtcggcccggtggtcgatgctgaaggcatttcccgcagcatcatgacggtcaagtattcgcgcaaggcgacccctgcgcagatgcagaccttccaggaaaacttcaagaaaggcctgttccagttctacggtaacgcgctgctcgagtacaacaaccagggcattaccgttgcgcctgccggtgatgagtcgggtgatcgcaccagcgtcaacatgagcgtcaagggtaacaacggtgccgtctaccctgtgcagtacacgctggagaaggtcaacggtgagtggaagctgcgcaacgtgatcatcaacggcatcaacatcggcaagctgttccgtgaccagttcgctgatgcgatgcagcgtaatggcaacgacttggacaaaaccatcaacggttgggccggtgaagtcgcaaaagccaaggaaacatccgataaagaagccgggaagtctgcgcaatgaccgagtcggctgttcgtcttggcgacgccggtgagttgttcctcagcggcgtgctggattaccgcacagggcctgagctgcgcaagcagggtcaggcgctgatcaaaactagcactgcgcccgcgctggtgctggattgttcggccgtgaccaagtccagcagcgtcggcttgtcgctgctgctgtgcttcatgcgtgacgccgaagcggcaaaaaaaacggtcagcattcgggcattgcccgaagacatgagtgaaatcgccgaagtttccggtctgaccgagctgctggcgcatccttaataaacattattaaagaagccccccgtcagagtcctgctatgcggggttcgcaggcgcggggcttttttgtatgatgtgcgacccgcgcgcactgggcgccgatagaggttgagcatgcaggccctagaagttaagagctttcttgaaggaaagctgccggaaacgaccgttgaagttgaaggcgaaggctgcaacttccagctgaacgtgattagcgatgaactggcggcactcagcccggtcaagcgtcagcagcagatctatgcccatttgaacccgtggatcaccgatggcagcatccatgcggtcactatgaaatttttcagccgcgcggcctgggccgagcgcacctgagcccccaaggcgtcgagattcttatggataaattgattattaccggcggtgcccgccttgatggcgagattcgcatctccggtgcaaaaaactccgccttgccgatcctggcagcgaccctgctgtgcgatggcccggttaccgtagccaacctgccgcacctgcacgacatcaccaccatgatcgagctgttcggtcgcatgggcatcgagccggtgatcgacgagaaactggccgtcgaaatcgacccgcgcaccatcaagaccctgatcgccccgtacgaactggtgaaaaccatgcgtgcgtcgatcctggtgctcggcccgatggttgcccgtttcggcgaagccgaagttgccctgcctggcggttgcgccatcggctcgcgtccggttgacctgcacatccgtggcctcgaagccatgggcgccgttatcgacgttgaaggcggctacatcaaggccaaggcgccggaaggcggcctgcgtggtgccaacttcttctttgataccgtcagtgtgaccggtaccgagaacatcatgatggccgctgccctggccaaaggccgcagcgtcctgcaaaacgccgcgcgcgagccggaagtggtcgacctggccaacttcctgaacgccatgggcgctaaggtttccggtgccggcaccgacaccatcaccatcgatggcgtagagcgtctgcataccgccacctacaaggtcatgcctgaccgcatcgagaccggcacctacctggttgccgctgccgtcaccggtggccgcgtcaaggtcaaggacaccgatccgaccatcctggaagcggtcctggaaaaactgcgcgaagccggtgcagaaatcaccaccggtgaagactggatcgagttgaacatgcacggcaagcgtcccaaggccgtcaacgtgcgtaccgctccgtacccggcgttcccgaccgatatgcaagcgcagttcatctccctgaacgcgattgccgaaggcaccggtgccgtgatcgagaccatcttcgaaaaccgcttcatgcacgtgtacgaactgcaccgcatgggcgcgaagatccaggttgaaggcaacaccgccatcgtcaccggcactgagaagctcaagggcgcgccagtcatggccaccgacctgcgggcttcggccagcctggtgatctcggcgctgatcgccgaaggcgacaccctgatcgaccgcatctaccacatagaccgtggttacgagtgcatcgaagaaaaactgcagatgctcggcgcgaaaatccgccgcgtaccaggctagttgccgtttgtagtgagcgggcttgccccgcgctggactgcgcagcagtcccttttttggggtcgctacgcaacccagcgcggggcaagcccgctcaccacaagaaggtgcctgccgttgaataagcagcatgctgaacttgtttcaaatcgaggctgtaatggcctcgatctgtgtccggcgccgtttgcgaccggaccgcaatagcctgatgaaggactgacgtttcccatgttgaccatcgcactgtccaagggccgcatccttgacgacacgttgccgcttctggctgaagcgggcatcgtgccgaccgagaatccggacaagagccgcaagctgatcatccccacgacccaggacgacgtgcgcctgttgatcgtgcgggctaccgacgtgcctacctacgttgaacatggcgcggccgacctcggcgtcgccggtaaagacgtgctgatggaatacggtggccagggcctgtacgagccgttggacctgcgtatcgccctgtgcaagttgatgaccgccggccgtgtcggtgatgtcgagcctaaaggccgtctgcgcgttgcgaccaagttcgtcaacgtcgccaagcgttactacgccgagcaaggccgccaggtcgacatcatcaagctctacggctcgatggagctggcgccgctgatcggcctggctgacaagatcatcgacgtggtcgacaccggcaacaccctgcgcgccaacggtcttgagccgcaagaattcattgcagacatcagctcccgcctgatcgtcaacaaggcatcgatgaagatgcagcacgcccgtatccaggcgttgatcgacaccctgcgcaaggcagtggagtcgcgacaccgcggttgacttacccgcgcggcctcaggtcgcgcccgtctatccgcctcatagccagaattctcaggtgcccaagcggatcgactgctaactttcggcgcctgagcatttttgccaatcctatgaggccctcgctatgaccacgtccactgcaattgcccgactcaacgctgccgacccggatttcgcccatcatctggatcatctgctgagctgggaaagcgtgtccgacgattcggtcaaccagcgggtgctcgacatcatcaaggccgtgcgtgagcgcggtgacgcggcgctggtggacttcacccgtcagttcgatgggctggacgtcaagtccatggctgacctgatcctgccccgtgaacgcctggaactggccctgacgcgcatcaccgcgccgcaacgcgaagccctggaagtggcggccgcgcgtgtgcgcagctaccacgaaaaacagaagcaggactcctggagctacaccgaggccgacggcaccgtgctggggcagaaggtcacgccgctggaccgcgccggtttgtacgtgccgggcggcaaggcttcgtacccttcgtccgtgctgatgaacgcgattccggccaaagtggcgggcgtgaccgaggtggtcatggtggtgccgacgccgcgtggtgaaatcaacgagctggtgctggccgctgcctgtattgccggagtcgaccgcgtgttcaccatcggtggtgcccaagccgttgccgcgctggcctatggcactgaaagcgtaccgaaggtcgacaaagtggtcggccccggcaacatctacgtcgccactgccaagcgccatgtattcggccaggtcggtatcgacatgatcgccggcccttcggaaatcctcgtggtgtgcgacggccagaccgacccggactggatcgccatggacctgttctcccaggccgagcacgacgaagacgcccaggcgatcctggtcagcccggacgctgagttcctcgataaagtcgctgccagtatcaataagctgctgccgaccatggagcgcgccgaaatcatcgaaaaatcgatcaatggccgtggtgcgttgatcctggtgcgcgacatggagcaagccatcgaggtggccaaccgcatcgcgccggagcacctggagttgtccgtggccgacccacaagcctggctgccgtcgatccgtcacgccggtgcgatcttcatggggcgccacaccagcgaagccctgggcgactactgcgcaggcccgaaccacgtgctgccgacttccggtactgcgcgtttctcgtcgccgctgggggtgtatgacttccagaagcgctcgtcgatcattttctgctcgccgcagggcgcttccgagctgggcaagactgcctcggtgctggcccgtggtgaatccctgagcgcgcatgcccgcagcgccgaataccgtatccttgaagagaaggggaactgagacatgagcaaattctggagccctttcgtcaaggacctcgtgccttacgtgcccggcgagcagccaaagctgaccaaactggtcaagctcaacactaacgaaaacccctacggcccatcgcccaaagccttggcggcgatgcaggccgagttgaacgacaatctacgtttgtacccggaccccaacagcgacctgctcaagcaggctgtggccaagtactacggaatcgacgctggcaaagtgttcctcggcaacggttccgacgaagtgctggcgcacatcttccacggtttgttccagcacgacctgccgctgctgttcccggacatcagctacagcttctacccggtgtactgcggcctttatggcatcaaatccgacccgctgccgctggatgaccagttccagattcgtgtggcggactacgccaagcccaacggcgggatcatctttcccaacccgaacgcgccgaccggttgcgtactggcgctggacgcggtggagcagattctcaaggccagcccggattcggtggtggtggtcgatgaagcctatatcgacttcggcggtgaaaccgcgatcagcctggtggatcgctacccgaacctgctggtgacccagaccctgtccaaatcgcgctcactggccggtttgcgggtgggcttggccgtgggccacccggacctgatcgaggcgctggagcgggtcaagaacagcttcaactcctacccactggaccgcctggcgattgttggcgcggcggcggcgttcgaggaccgtgagtatttcgagaagacttgccggttggtgatcgacagtcgcgacaagctggttgcgcaactggaagagaaaggctttgaagtgctgccgtcggctgccaacttcatttttacccgtcacccacggcacgacgccgctggcctggcggccaagttgcgtgagcaaggggtgatcgtgcggcacttcaaacaggagcggattgcccagttcctgcggatcagcatcggcacgccggagcagaaccaggcgttgatcgatgggctgggccagctctaacaagcgctgaaatcaaatgtgggagggggcttgcccccgattgcggtgtatcagccagctaatgcgttgactgacacactgctatcgggggcaagccccctcccacattgggttctacggtgtgggttagatcaacggctcgtcagacttcttgttcttccagccatcattgcccggcagcagcaggttcaacccaatcgctaccaccgcacacagggcgatacccttgaggccgaagtcatccgggccggtgccggtaccgaccagcacaccgccaatcccgaacaccaacgtcaccgacacaatcaccaggttgcgcgcttcgcccaggtcgatcttgtggcggatcagggtgttcatccccaccgcggcaatcgagccgaacagcaggcacagaatcccgcccatcaccggcaccggaatgctctgcagcaacgcgccgaacttgccgatgaacgccaggctgatggcaaacaccgctgcccaggtcatgatcttcgggttgtagttcttggtcagcatcaccgcgccggtcacttcggcgtaggtggtgttgggtgggcccccgaacaggccggcagccgtggtggcaataccatcacccagcagggtgcggtgcaggccgggcttcttcaagtagtcgcgaccggtcacgctgcccaccgcaattacaccgccgatatgttcgatcgccggggccagggccaccgggacgatgaacaggatcgcctgccagttgaattccggcgcggtgaagtggggcagggcgaaccagggggctgccgcaatcttcgccgtgtcgaccacgccaaagtagaacgacatggcaaaacccactagcacgccggagataatcggcaccaggcggaaaatgcccttgccgaacaccgccacgatcaaggtggtcagcagcgccggcatcgagatcatcatcgcggtctggtaatggatcagctcagcgccatcaccggctttacccatcgccatgttcgcggcaatcggcgccatggccaggccgatggagataatcaccggcccgatcaccacgggtggcagcaaccggtcgataaacccggtgcctttgatcttcaccgccaggcccaggaaggtgtacacgaaacccgccgccatcaccccgcccatggtcgccgcgaggccgaactggcctttggcgagaatgatcggggtaatgaaggcaaagctcgacgccaggaataccggcacctgccgccctgtcaccacctggaacagcaacgtgcccaggcccgcggtgaacagtgcgacgtttggatcaagacctgtgatcagcggcatcaacaccagcgcgccaaatgctacgaagagcatttgtgcgccagacaggatctggcgccaaagcgggtcgttgaattcatcctgcatgctcacgcgtccttctgcttggtgccaaagatcttgtcaccggcatcgcccaggcctgggatgatgtagccgtgttcgttgaggcgctcgtcgatggaggcggtgtagatctgcacatccgggtgagccttctcgacggcagcgatgccttcgggtgcagccaccagcaccatggcgcggatatccttgcagccagcttttttcagcaggtcgatggtggcaaccatggaactgccggtggcgagcatcgggtcgatgatcatcgccaggcgctcgttgatttccgggacgagtttttccaggtaagtgtgggcctgcaaggtttcttcgttgcgggccacgcctacggcgctgaccttggcgcccgggatcaggctgagcacgccttcgagcatgccgataccggcgcgcaggatcggcaccacggtgattttcttaccggcgattttctcgacctgcacgggaccggcccaaccagggatttcatagctctccaagggtaaatccttggtcgcttcgtaagtgagcaacgctccgacttcctgagcaagctcacggaagttcttcgtgctaatgtcggcgcggcgcataaggccgagcttgtgtcggatcagcgggtggcggatctcgcgagtgggcatgggaaaggctccggcggcgggcaaaaaaaccggcctagattaatctatccgagggtgttgtcctatagacatctagtacgttagtccattaaggcttgctcggagcgcacgagaagcgtaccttcgcccgcttttcttgccacagcacccccttggagagcgccatgtccgctgatctcgagcatatccgtcaaatcatgcgcgaggctgactgcctgtacaccgaagcgcaagtcgaagaagcgatcgccaaggtcggcgcacacatcacccgcgaaatggccgacaccaacccggtggtcttctgcgtgatgaacggtggcctgattttcgccggaaaattgctgacccacctgcaattcccgctggaagcctcctacctgcacgccacccgctatcgcaacgaaaccagcggcggcgacctgttctggaaagccaagccggaagtctcgttcatcgaccgcgacgtgctgatcatcgatgacatcctggacgaaggtcacaccctgggtgcgatcatcgacttctgcaaacacgccggcgcgcgcaaagtgcacaccgccgtgctgatcgacaaagatcacgaccgcaaggctcgcccggacctgaaagccgattacgtcggcctgccgtgcattgaccgctatatcttcggttacggcatggactacaaaggctactggcgcaacgccaatgggatcttcgccgtcaaagggatgtaagtcatggcccgttttcttgatcagacgctgtttgccgaactggccgagaaagcggccgccagcccccgtggccggcaccaccataacttccaccagatggaagagccttgtcatcgcctggcggtgggcctgcaacctgacacctatgtgccgccgcatcggcacctgagtgcggacaaggcagaaaccttgctggtgctgcagggccgcttgggcttgctggtcttcagcgaaaccggtgaggtcattgccaagcgtgtcatgcaggccggcggtgaatgcgctggtgtggatctgccacccggtgtcttccatggcctggtggtgttggagcccgacacggtgatgttcgagtgcaaggccgggccttatcgtccggtgggcgagggcgaacaggccgattgggcaccccgcgaaggcgaggccggtgtggccgagtaccaacgctggatgcttgcccagttcgattgagctacagtgctgggcccaccttgccggagcggcccatgagcctgttgatacgcacctgcgccgccctggcgctgaccctcagtttgcccctggctgccgcgcctgcgccgatgcacagccaattcctgccttcggacgacctgactctgcgcgctgaagcgccggaccagcagcaattgctgcaagtcaccgagtacgcggtggtggtgggcaaccagcgccagtccagccaacaacccatcccggtgactgcgccgttgatgattcgcctgaagggcaagtccctgaacaaaggcgcgaccatcgcccaggtggtgctcaatttcgacgctgaaagcaaaagcctgaaaaagccggcctacgatgacaagagcaagactttgaccttgtcctacccggtggcccaataccgtgtgattgttgacctgttgcgcaatgacacggtgtatgtgcagttcctcagttatgccaatgggcatatctgggcggatttgcacactggtgcggtgcgtacccaatagcaagaacactgaaaagccaacgtgggaaggagcttgctcctgattacggtggggcggtcaattagatgtcgcctgacactccgccatcgggggcaagccccctcccgcattgaatctccagcgctttcgaagcctgcgtcgcacaggtagacttcaaaccccgtgtaaatgtctgcaggctggagtcggtaatgcgtaaagataagaaacaggtgattggtgacgagatcggcgacgatcagatcaagttgttcctggacttcgagccggtcgacgcgacttccccgtccctgcacaaactgatcaaggcctaccgtggcctgcgtatcgacgatttcgagcggttcctgggcttcttcaaggaagccggcctggacctcgacggcaaggatgagcatggccagaccttcgtcgacctgatcaaggaccagcgcaacgcggacgagtacatcgaactgatcgaaaacgctcgcggctgattatccaagccacaaaaaaacgccccgttctcaggttgagagcggggcgtttttcatggcgcctcaagcgtagctttcggtctcggcggcaggttcaaccagttccaggctgatgttgttctgcgcgttgatcttgcgatacaactcggcatccgtttccaggaccttttcacgggccgggaagatctcgtgcagtttggcagcccactcaccggcggctttttccgggaagcacttctcgatcagttccagcatgatcgaaacggtcaccgaagcacccggggacgcgcccagcagcgccgcgagcgtgccgtctttggccgcgaccagctcggtgccgaattgcagcaccccgccttttttcgggtctttcttgatgatctgcacccgttggccagccacttccaggcgccagtcttcggctttcgcctcagggtagaagcggcgtagggattccaggcgctgttccatggactgcatcacttcgctgaccaggtacttggtcaggtccatgttgtcgcgggccacggccagcatcgggccgatgttgccggcgcgaaccgacagcggcaggtcgaggaacgagccgtgcttgaggaacttggtggtgaagccggcgtatggcccgaacagcagggatttcttgccatcgaccacacgggtgtccaaatgcggcacggacatcggtggcgaacccacggcggcctggctgtagaccttggcctggtggtgcttgaccacttccgggttgtcgcaacgcagccactggccgctgaccgggaagccgccaaagcctttgctttcttcgatgcccgaggcttgcagcagcggcagtgccgcgccgccggcgccgaggaacacgaacttggcatcgacttcacggctgttgccgctgttgacgtccttgatgctcacggtccagcccgcgacgttgcgcttgaggccggtgacgcgtttgctgtacttgacctgggcgtctgccgagctggtcaggtggctgagcagttggttggtcagggcgccgaagttcacgtccgtgccgttcatcacacgggtcgccgcgattttttcgtcgagcggacggcccggcatcatcagcggcatccattcggccatctcactgcggtcttcggtgtagtgcatgtccgagaacgcatggtgctggctgaggctttcaaagcgcttcttgaggaaggacacgcctttttcgccctgcacgaagctcaggtgcggcaccgggctgataaaggacttggacgagccaaaggtgccctttttggtcaggtacgcccagaactgcttcgacacctcgaactgggtgttgatgtgcacggctttcttgatgtcgatggagccatcggcggcctgcggcgtgtagttcagctcacacagcccggcgtggccggtaccggcgttgttccacgggttggaactttccgcggcacccgaatccatcagctcaacgacttccagcttcaggccggggtcgagctctttgagcagtacggccagggtggcactcatgatgccggcccctaccagtactacgtcgactgcttcgttatgcgccatttaacgcgtctccaaaatctgctgcaccaaattgacggcatggctgccaggagtgacggggcggttcacgtgttgccccaggttacccatggccaggatcgccatgtccgattcgcaattctttgcatgttcagcgcacgcttcctgccgggctaatctacctatgaacgcattcatgggcgcctgtggcaattcgacttatggtcaaagcgtgcgattcgtgcaaccaatccgtagcggacaggctcaagctccggtttttaaggcgtgctcggtcctgtgtggttgggctgttccagacgctgatggtgcttgtacaaacgccaaactattcatttgctcgccacactcttgtgaagttgtgaaaacccgttttttcacgctcttttgaagacgtgaacctcaaaaaagggctgccccagcctggcacctggcccctagccgacacgcggcaaaacgggcaaacaactcaagtggccgagcgcaatggcagctctggcagattcggtaaaggcgggtggtttgcaaagaaaacagcaagcgcgccagcttcactcgatctgtgtgggcggctctctgtgggcgattcttggggctaatgccgaggcattaacgatgctgcgaggcccgatcaggagacgtccttataatcggggggagattgtagcgaagaacgccagggaaatgggcgtgttttatgacttttattagccgttcggtcaggcggccaacggttggtgatgcgacggctgcgctgcacgtgggctgacacgggcgctggctggcagcgggtggtgcatccagctcaggcggatttcatcgatttccacccagccgtcgcctacaggaggctggcagcactctttgaaggcctggcaacggccttgcacatcgagcagggcgaactggcgaaggaccggtttgcgcgtgaacagtgaccagagaaattgcatggcgacagacctcttgagattgaggccaagcttgcctgtcgggcatgacgggcctgtgtatcagccgtgacatatcagtgacatcgaaccgctacagtctgtgcaggtctcaggttgtaactggcgctagttcccggcactggcgcaccgctatactgcccgcctgtcggtacccgatttctggagagaagagcatgttgcaacgcctgttgttcggtttgatcactgtgaccagtttgaccctggttggctgcgccaacagcccgcaacaactgaccccggaaccaaaaatcaccacgcagttggcccccgtgggtcacggtcagccagtgtcggtgcgtgtggtggatggtcgtccgtcgcctacgctcggttcgcgcggcggcctgtatccggaaaccgccctggtctcggtgaatgcgcaagacgtgctgcccaagctgcaggcccaggccgaagcagccgtgcgcctgttgggtttcaccccgagcgccaacgcgccgggcgctccgcagttgacgatcaccctggccgaattgaagtaccagtcgcctaaagacggcctgtacgtgaccgaagcgtccatcggcgcgacgttcaagtccgacgtcaccgccggcacccgtcgctacagcggccgctacggtgcgtccctgaaccagcgtttcggtatgtcgccgaaccaggaaaccaacaccaagctggtcagcgacgtcctgagcgacgccttgacccgtctgttcaaggacccaagcatcggttcgctgctcagctcgcaataaccgattctgtaaaaaaaaccgggctcatcattgagcccggttttttttcgtcttcagtttcatgcggccgtgtcgatacagaaatccagcaggctcaccccggtcaacagatcggcctccggcaggtcggcatgctggtgtccgccgagggcgcaatacaccagccagtggcggtcctggacgttgaaggccaggccgccgatcagcgcttcctgctcatcgctctgggcgatcagatacagccgatcctggttttgtgcatgcagcatgacaagctcctaaagcgtcgaagggcaacagagtggcttgttaaggtgacgttcaggtgacgttgtaaattactggatacattagccgtcaatgggggagggagcatttcaggcgccggaggccactatcgttcaggtttgtatctgaaccgataccaaaacactgttttgccgaggtttttgatggcgctgcccgcactgttgaccaatgttgttgctttggccgtggcctgtccgggcgcggcgctgctgttcattacccgtctgcgcgaacagcgcgccatggctgacctgaccgcgcagagcgaagatcgcgcaattgatcagccgatgttgtttctggatgtgcgcaccgaacgggcgcatcgtctggcttaccgcgtcggtttcgcctgcctggggttggcgctggccatttcctggctcagcacccgcctttaagaacaccacaaaacaaatgtgggaggggggcttgcccccgatgacggagcttcagtcgacagctgattgactgatacaccgctatcgggggcaagccccctcccacatttttgaatcggtgtttagaggggtattccagccttgacccgatactgattacgcaccggcgtcgcatattgcaccaccaggaacggccggtgctcagccgggcattcgttcaaacgccgctcccactccgccttcgccttggccagttcatcggccgggaatacttcggccgccgtcggcacctgcaattgcgggtcggcgtcgctccactgggcgtaggccaggtaatgcaccgggaacaaccggtagccccccagaatctgccggtccatttctgcggccagcaacttggtgtcttcgaaacgctcggtaatcggcggcgcgaagttaatgtgcacgcgtcccttgtagccggtgatgcccagggcaatgctcacatcgtcttcgccctgcgccttgacgtaggtgccggtggtagcacggatgtacagctcgcgggccttggctgaatcacatgggtcgtattcgtagctgatggacaccggcgtcaggttcagcgactggatcacctcggcaaacggctcgtccttgcggctgacatggaacatcttgaggatcgccgactcggtacggtcatctccatccttggcgcgcccttcggcctgggcgatccagatcgacgcaccgtcgttgcggatcgaatggttgatgtaggccgacagcaattgataggccgccatcttctctttgcgcccggtgatcgagcggtgcacgatgaaactcttgttcaggcgcatcaggtcgctgacaaacggcttttgcagcaggttgtcgccaatggcgatgcggggtgtcggcaggccggcgtggtacaccgcatagttgacgaaggccgggtccatcacgatatcgcggtggttggccaggaacaggtaggcggtgccggacttgagctgctcgaccccggtgtaagtcacgccgtcggtcgcccggtcaatggtgtggtcgacgtagtactcgactttgtcctgcagcgtggccacggtggtgacgccggcgaattcacggcgcagtttgcgggcgatcatcggcttgagcagccagcccagggcgccggcaaagcgcgggaaacggaagtgggtcaggatgtccagaaaggccttgtcactgaacagacgtgccagcactgccgggacttcgctgtcattgtaaggtcggatggtatcgaattcgcccatcatgctctcttgttagaaacggctagggtaagtaaaggaaataccagggtgcggcccgagtaatgggctcggccaaaaatagccctgtaaatagaccggcgattatacgcacaagtcaccttggaggctgcgatgctggaaagcgcgacgtacgattgtccttattgcggtgaagaggtcgagacaacggtggatttgtccgggggcgatcaggtttatatagaggactgccaggtgtgctgccgaccgatcattttcgatctgcaggtgcatggcgaagaatggatgcttgaaacccgtagtgaaaacgaatagcgggggcgctgatgcaacgaatctacgaaccggaaaacctgatggaaggcgagttgctgcaacagatgctcgccagtgaaggcatcgaggcgcacctggtggggcggcatttgctcggtggcaccggcgagttgcccatcttcggcctgctggggctggaggtggacaatgaccgcgccctcgacgcccgcgagttgattaccgcctatatcggcgcgcaaccgctgccgggcgacgaacccgacagcttccccgacgtgctggtctgttaggctgtcggtcggtttacccaagagtcgtgttgccccatgtgtggacgttatgccttgtttcgctggacccccgcttttgctgccctgccgggctttccggccgatcagcaggcccagtggaacatctccccgaatgattcggtgctgatccagcgcgccgccgacggccagcgcaccctggcccgcgctcgctggggcctcaccccgccctggctgactgatctttcccgcactcccgcccacgcccgcgccgaaaccctggccgaacagccgatgttccgcgaagcattccgtcagcgccgctgcctgctaccggccaatgggttctacgaatggcgcggcacccagcgcaagcgcccgtattggctgacgccgggggagggctccacgttgttttttgccgcgatctgggaggcctatccggtgcaggaacaggtgtggttgagcacggccgtggtgacccaggccgcgcaggcccagcgtcggccactgattctggatgaggccgggcaggcagcctggctcgaccctgagacgccgttgcatgtgttgcaaggcttgctggccagtgagccgagcgcgttgcgcgagcgggtcctggccaacatggtcaatgatcccaagctcaatgggccggagtgcctgaccccggcttagaccttgaactgattgatcagccggcgctgctgctcggccaacttggtcaagtccgcactggccgcgctggattcatccgcgccgcccgccacttcattggccacctggccgatattgatcacgttgcgattgatgtcctcggccaccgcgctctgctcctcggcggcactggcgatctgagtgttcatgtcgttgatcaccgagactgcctgggtgatggtctccagcgcttcagccgctttggccgcatgttgcacgctttcatcggtgcggttctggctgtcctccatcacccgcaccacatcccgcgtgccttgttgcagttgctggatcatggtctggatttcttcggtggccttctgggttttctgcgccaggttgcgcacttcgtcggcgaccacggcaaaaccacggccttgctcgccggcccgcgccgcctcgatggcggcgttgagtgccagcaggttggtctgctcggcaatcccgcgaattgccgtgaggatggcgttgatgttttcgctgtccttggccagggtttgcaccacaccgacggccttgccgatttcctcggcgagcgcgccgatggaggtggaggtgtcacgcacgatgcgcatgccctggctcgcggcctggtcggcatggctggcggcctgtgcggcttgggtggcgttgcgtgcaacgtcttgcgcagtggcggtcatctcatgcacggcggtggcgacctggtcgatctccaccatctgtttgtgcacaccctggttggtacggatcgcgatatcagcggtgtgctccgaagagtcgctgaccttctgcaccgaactcaccacctgggtgatcatgccttgcagcttgatcaggaaggtgttgaaaccgttggcaatcgcgcccaattcgtcggcgcgatcactggtcaggcgccgtgtcaggtcaccctcgccctgggcgatgtcattgagcatcgcgaccatttgcttgagtggccgggcaatgccatggcccaccagccagatcaccagcaggccgataccggcgatcagcaggccggcgatagtcatgccgaaaatatcggtcttgcgctgggtttccaggtcgctttgcagtttctgcgagtcggccattaccgcactcaaaggcagctgcatcatcagggtccagcgtgcatcggtctggccgatgttgaacggcaggaacaactcgatatgcccatgttccttgtcgatgtcgtagcgtacttcgccgattttcagttggcccaggttggccagttcgttgccatcgagcaggtcgctggccttttcgccgagcttgctggcgtccttggtataagccaccaaacgcccgttgctggagatcagcgccagttctccggcaccgttgtagagtttctggtcggcgctggtgagcatgtcctggatgaagttcaccgacaggtcggcaccgacgatgccctggaacgtgccgtcgatcatgatcggctcgataaacgacgccagcatcaccatcgcgttgcccaccttgtaaggggccggatcgatggcgcaggcctttttgctttccttggagcacaggtagtactcgctggcgcgcacgcccgtagagaggattttctggtcggccacgtccgccagcttatccatgcccaggctgccatctgcattgcggtaccaccacggcaggaaacgtccgtcggcgcccatgccgacaatcgggctgttcacgtaggccgcgtcgttgtgatcgatggcgttgggttcccagccgatataggcaccgaggattttggggttgcgcaccacggtttcgtgcagcaggttgatcagttgctcgcggccgagctgcagggcgggttcacccttcgcgtctttcatgccgagcagggcgttggcagtggccaggctcttggcggtcaccagtggcgcttccagttcgcgctggatcaaggtggcctgggtttgcgccagggcggtgaggcgctgttcgataatctgttcgaactgcacttgggtacgctcctgcaccatttcctgggtgcgtgcgccggcaaacaaggcgtagagcaccaacaccgctactacgctcaggacaatggcgccggccagtgccgcgacagaaaattgaatcgacttgaatttcatgaaaactccgggcgcaggggagagggcctgtcttgtgtatcggccgagggcgaggtgggcatgaggggggcgcccggcaaaatcgggggatgtgtcgcaaacagaatgctcggcgccgccgctggcgtgtgagatgtatcggaaaatcagcggttacacgtctggtgtatctggcgtcgatacaaatgtgcgcctacgatacgcgccatgttttaagggcgtgttttcagggagagtgttgatgaagaagtcattggtgataagcgggttggctgcagcgctgctgctggccgggtgtcagtcggtcaacaccaccagcggcggtgccgttggggtggaacgcaagcagtacatgttcagcatgctgtcgagccaggaagtcgaccagatgtatgcccagtcctaccagcagaccttgggtgaagccagtggcaagggcctggtggacaagaccagcgccaacgccaagcgcgtgcaggccatcgccaaccgcttgatcgcccaggcgccgacgttccgtgcggatgcggcacagtggaagtgggaagtgaacctgatcaagagcgacgagatgaacgccaactgcgggcctggcggcaagatcttcgtgtacagcgcgttgatcgacaacctcaagctcaccgatgacgaactggcggccgtgatgggccatgaaatcgcccacgccttgcgcgaacatggccgcgaagccatgtccaaggcctacgggatcgaaatggccaagcagggcgccggtgcgttgttcggcctcggccaggacagcctggcgctggccgataccgtggccaactacggcatgaccttgcccaacagccgcagcaatgaaaacgaagccgacctgatcggcctggagctgtcggcccgtgccggctacaacccgaacgctgccattacgctgtggaacaaaatggccaaggcctcggaaggtgcgccgccggagttcatgagtactcacccggcctccgacagccgaatcgcctcgttgcaggcggcgattccgaaggtgatgccgttgtaccagcaagccaagaagtcctgacgttgtgaagatctaagtgtgggagggggcttgcccccgatgcgttgggtcagcccattagatgcctactgacactccgccatcgggggcaagccccctcccacagggcccctttagatccagccgctgctttgcatggctttgtacacggccacgatagccaggatgaaaaacgccgtagccgccaaccgacgaatcaacgtcaacggcagtttctccgccgcaaaattccccgccaataccaccggcacgttggcaatcagcatgcccaaggtggtgccgataatcaccagccacaactccgggtactgcgccgccagcatcaccgtggcgatctgcgtcttgtcaccgatttccgccaggaagaacgcgatcagcgtggtcaggaacggcccgaatttgcgcgtggtgctggcttcgtcatcgtcgagtttgtccggcaccagggtccacagcgccgtggcgcagaagcttgccgcaagaatccagtgcaacaccgcgtccgagaagaaacttccgaaccaggctcccacggcaccggcggctgcatggttggccagggtcgcggcaacgatgccggcgatgatcggccagggtttgcgaaagcgtgcggcaaggatgagcgcgagcagttgcgtcttgtcgccgatttcggccaaggcaacgattgcggtaggaacgagcaatgaatccagcatcaggtaggtttccaggggcgggtcgacacggctatgacacgtacagccttcccgccccgggtaaggtgtgcgtgtcataggtcttgtcaaaccccggtccgtctgtgcggactcctgggtcgcatacgccatggtctgctgaccaagtatgttgacgtatgccggacgagcgtggcgctcgtgggagactactcccctaggacggagcggattctgcctaggcaaaacccattcggcaagcgttctttttcaaacgcccgtcagccgcgcttggcgcggtagatgcgaaaaccgttgccttcagcctttactccacacacgcccaagtgctcttcgatcagcggctggtacttcaggaaactgttggcgaccaggcgcagttcgccgccttttgccaggtgtttcgctgcttttcgcagcaggttttcggtggcgaaataatcggtatgcaccccgacatggaacggcgggttgctcaaaatcgcgttcaaacccatcggcgccgcgtcgataccgtcacccgtcaatacttcggcttccagaccgttggcagccagggtcaggcggctgctcgcagcggcaaaggcgtccacgtccagcatcgtcacgctgttatgcgggtagcgacgtttgaccgcagcccccagtacaccggcaccgcagccaaaatccagcagatgcccgctcggcagtttgtccaggtgctccagcaacagctcggtgccgcgatccaggcgaccgtggctgaatacccccggcaagctcaccaccttcagcgggccttcggccaatggcacctcgaaaacctgcgccaggctttccagttcgaccgcttgcggcgcattggccacggtgacctgccacagctggcaatgccgtgcgttgtcgagcttgcgcggcttgccaaaggggatcatctgcttggccgcgctttcgataccggcctttttctcgccgaccaggaacagctcggcgccgggcaggcgtgcagccacggcgttgagcaggtagtcggtcaggtccttggatttgggcaggaagatcaccgccgcatcgaacgcccgctcgggcacattgacaccgaagtggctgcgctcggcaaagcgtgcatcgagcgccgcctggtcgccggcatgccagctccagccgtgggcgttgggcaggcgaccgagcaggtcgtcggcgggcaagcccaccaacagcaggttgccttgaaaaagttcggcctggcgaagcagtacttcactgcgcggatccatggtctgctccttgaaaaggggcgcagtttatcaactgacgacgcgcagcggggcgccgctgaaaaagccccgggcgttttccgccagttggccgacgatgcgctgccgcgcttcgcgactgccccaggcgttgtgcggggtgacgatcagccgcggaatatcgccggccagcagtgggttgccattcaccggcggttccacgctcagcacatcggtagccgcgccacccaagtggccgctactcaacgcatcggccagggcctgttcgttgatcaaaccaccgcgcgcggtgttgaccacaaacgcgccgggcttgagcaacgccagttcgcgggcgccgataaagtcgcgggtgtgttcattgagcgggcagtgcagggtgagcgcgtcgacctgcgccagcagttcatccaatggcacgcggtcggcgcgggcagggcgccccggaatcgcaccgagcagcacacgcatgccaaaggcttcggccaggcgcgccaccgcgccgcccagttcaccgtggccgagcaggcccagggtcttgccttccagctcgacaatcgggtggtccagcaggcagaactgcttggcctgctgccacaggccggcgccgacgtcccgttgataatccttcaagcgcgtcgccaggttgagcagcagcatgatcgtgtgctgggccaccgacggcgtgccgtagccctggcagttgctcacggtgatgccgtgggcgcgggcggcgtcgaggtcgacgttgttggtgccagtggccgacaccaggatcagattgagctccgggcaggccgccagggtttcggtgttgagggcgattttgttactgatcaccacttgcgcgccttgcacacgttcaaccacgttctgcgcagtggtgtccgtaaacaactgcaactcgctgaagctgttgcgcaattcgctgaggtcaaggtcccccaagtccagggaaggatgatcaaggaagacggcgcggcgattgttcgtcatcaactgtaccttttgcgacagggttcgaaggcgtaatctgccgagcctatcagatgaaataatccgttacttaatggagtgagtatgtacgccgccgagttcttgaccgtagccctgattcacttgttggcggtggccagccccggcccggatttcgctgtggtggtgcgtgaaagcgtgacccatggccgccgcgctggcacctggaccgcactgggcgtgggctcggcgattttcctgcacgtgggctactcgttgctcggcatcggcttgatcgtgtcccagtccatcgtgctgttcaacgcgctcaagtgggcggcagcggcctacctgctgtacatcggcttcaaggccctgcgcgcgcaaccggccaagccccccgttgaaggtgagttgcatcgcgaagcaggcgaacgtacgccgcgtggtgcgtttaccgccggttttgtgaccaacggcttgaaccccaaggccacgttgttcttcctgtcgttgttcaccgtggtgatcaacccgcacacgccgctggcaatccaggccggttacggcgtgtacctggcggtggcgacggcgctgtggttctgcctggtggcgatgttgttcagccagcagcgcgtgcgtgccgggtttgcgcggatgggccattggttcgatcggaccatgggcgcggtgttgattgcgattggggtaaagctggccttcaccagcatgaaataagctggatgctggcgcaaagctagcattcgctggggtctgcaaatcattcctttggctgatttggctgaaacataaggtctctaaagtgcaggtcttcaagccaagaccgtgcagtcagaaaagggattcgtatgttgcagacccgtgttatcccgcccgccgaaggtgcgtaccaatacccgctgttgatcaaacgcctgttgatgtccggcacccgctatgaaaagacccgggaaatcatctaccgcgaccaactgcgctacacctacccgaccctgatcgagcgcgtcgcccgcctggccaatgtgctgaccgaggccggggtcaaggccggtgacacggtggccgtgatggactgggacagccaccgttacctggaatgcatgttcgccatcccgatgatcggcgcggtgatccacaccatcaacgtgcgtttgtcgccggaacagatcctgtacaccatgaaccacgccgaggaccgcttcgtgctggtcaacagtgagttcgtggggctctaccaggcgattgccgggcacctcaccaccgtcgacaagaccttgctgctcaccgatggcgaggtcaagaccgccgagctgcccaacctggtgggggagtacgaaagcctgctggccgccgccagcccgaagtacgacttccaggatttcgacgaaaattccgtcgccaccactttctacaccaccggcaccaccggcaatcccaagggggtgtacttcacccatcgccaactggtactgcacaccatgggcgtggcgaccatcatgggcagcgtcgacagcgtgcgcctgctgggcaccaacgatgtgtacatgccgatcacgccgatgttccatgtgcacgcctggggcctgccgtatgtggcgaccatgctcgggctgaaacaggtctaccccggtcgctacgacccggaatacctggtggagctgtggcgcaaggaaaaggtcaccttctcccactgcgtgccgaccatcctgcagatggtgctcaacgccaaggccgcccagggtgtggattttgaagggtggaaaatcgtcatcggcggcagtgcgcttaaccgttcgctgtacgaagcgtccaaggcccgtggcattcagttgactgcggcgtatgggatgtccgagaccgggccgctggtgtcctgcgcccacctcaacgaagaactgatggccggcaccgaggatgagcgcaccacttaccgcatcaaggccggcgtgcctggcccgttggtggaagctgcgatcatcgacggcgacggcaacttcctgcccgccgatggcgagacccagggcgagctggtgttgcgtgcgccgtggctcagcgaaggctatttcaacgagccacagaagggcgccgagctgtgggccggcggttggatgcacaccggcgacgtggcgaccctggatgcgtttggcgtaatcgacattcgcgaccgcatcaaggatgtgatcaagaccggcggcgaatggatctcgtccctggccctcgaagacctggtcagccgtcacccggcggtacgcgaagtagcggtggtgggcattgccgacccgcagtggggcgaacgcccatttgccctgctggtagtgcgtgatggccatgtgataggcgctcgcgagctcaaggaacacctcaagccgttcgtggaactgggccacttgagcaagtgggcgattccgagccagattgcggttgttactgaaattcccaagacgagcgtaggaaaactcgacaaaaaacgtatccgtatcgacatcatcgaatggcaggccaacaacagcacgttcctgtctaccctgtgagctgactcgccgtgcccttgtggcgcggcaatgctctatctcgcgccttcacttgtgatttgccgattttcagccatccttgccgcgtcggcctttgtcgacatggcgaaagggtcgtggcagacgggtcggtgatgcaaatcacactttagagggatcaagcactaccccctgctggctatagtcccttccagagtttttcacggatgttccgcttcgggccatgggggctcggctgccgagcggcattggaatcgttgtattccggccgttacatgcatcagtaggaaaaaactcactgccataacaataatgcacatggagtagcgtcgatgacctcagtaaaccagttctggcgccgggcaagactgcccctggccgtcagtctcgcctctacgctcgccgggcccgcattcggcgtcagtttcaatatcggtgaaatcgaagggagttttgactcgtctctttccgtgggtgcgagctggtcgacggccaagcccaaccaggacctgatcggggtcaacaacggcggtaagggcctgtcccagacttccgatgacggccacttgaacttcaagcgcggggagacgttctcgaagatcttcaagggcatccatgacctggaactgaaatacggcgataccggcgtgtttgtgcgcggcaagtactggtacgacttcgagctcaaggacgaaagccgcccattcaaggacatcagcgacaacaaccgcaaggaaggcgccaagtcttctggcgggcagatccttgatgccttcatctaccacaactacaacattgccgatttgccgggcaacgtgcgcttcggcaagcaggtggtgagctggggtgaaagtaccttcatcggcggcggcatcaactccatcaacccgatcgacgtgtcggcattccggcgtccgggcgccgaaatcaaggaaggcttgattccggtcaacatgttctatgtgtcgcaaaccctgaccgataacctgtcggccgaggcgttttaccagttggagtgggaccagaccgttaccgataactgcggcacattcttctctcagcctgatgttatttccgacggctgcagtgacaatttgcgcgtgttgaacagtcgtcgcttcctgcctgccgcagtattgccagggcttgccgccaatggcgtcgacgtcaataacgaaggtgtattggtgcgtcgtggcccagatcgtgatgcgcgcgacagtggtcagttcggtgtcgcattccattacaacttcgagccgctggatacagaattcggcgcttacttcatgaactaccacagtcgtgcgccgatcttcagtgctcagggcgcaccgcaatcgaaatacacaggtgcaacgcctggtgtgccagcccaactgcgtccattggtggtcgcgggtaactccaactactacgttgaataccccgaggacattcgtctctatggcttgagtttctccaccaccctccccacagggaccgcatggagcggcgagttgagctatcgtcctaacgcgccggtacaactgagcacgacagacattctttttgccggtgtcacgccacttccccccttcaacaacgcgtctgtgttgaaggggacgccaggccaggacctgcacggctaccgtcgcaaggaagtcacccagttccagaccaccttcacgcacttcttcgatcaggtcatgggcgccagccgcttgaccactgtcggtgaaatcggcgtgactcacgtcggtggcctggaaagcaagtccgaggcacgttatggccgtgacccggtctttggcccgggttcgttgccaggtggtttctgcaacacgctcaacaactccacggcgcaagggggtggtttgcctaacgccgcgagcctgaacaccaactgcaacaacgacggttacaccaccgccacatcctggggctaccgcgcccgcgccatctgggaatacccggacgtgttcgccggcgtcaacctcaagccaaacgtggcgtggtcccacgacgtcaaaggttactcgccaggccctggcggtaacttcgaagaaggtcgcaaggcagtcagcctgggcctggatgccgaatatcagaacacctacaccgccagcctggcctacaccaacttctttggtggcaagttcagcacggtggatgaccgcgactttgtcgctttgagcttcggcgccaacttctaagcacactgcatttcaggaagaaccagaacatgaaaataaccaaaagtctgttgcacgtgggtgtgcttgggctgtcgatcctggcgagtaacgtcatggcggcagtctcggcggatgaagccgccaagctgggcacgagcctgaccccgatgggcgccgaaatggccggtaacgctgccggcaccattccaaaatggtcgccactgcccaccaacgccggcgccgtcgacgctcgtggattcctggccaacccgtacgccagtgagcaaccgcaattcaccatcaccgcagcgaacgtcgagcagtacaaggacaagctggcaccggggcagtacgcaatgttcaagcgctaccctgacaccttcaagatgccggtctacccgacccatcgcggcgccacggtgccggcggatgtgtttgcggccatcaagaagaacgcctctaacaccaacctggtgtccggcggcaacggtctggagaacttcgagaccgctatcccgttcccgatcccgaaaagcggcgttgaagtcatctggaaccacatcacccgctatcgcggcggcagcgtgactcgcctggtgacccaggccacgccgcaaaccaacggttcctacagcctggtgtacttccgcgatcagttcgtgttccgcgacaagatgaaggattacgacccgaaaaacccgggcaacgtgctgttctacttcaagcagcaagtgaccgcgccggcgcgtctggccggtggtgtgctgctggtgcacgaaaccctggaccaggtgaaggaaccgcgttcggcgtgggtctacaacgccggccagcgccgtgtgcgccgggccccgcaagtgtcttatgacgggccgggtaccgcagccgatggcttgcgtacatccgacaacctcgacatgtacaacggcgcaccggatcgctacgactggaagttggaaggcaagaaggaaatctacatcgcctccaacagctacaagctcgacgatccgaagctcaagtacgccgacatcatcaaggccggccacatcaaccaggacctggctcgctacgagctgcgccgtgtctggcatgtggtcgcgaccttgaaggaaggccagcgccacatctacgccaagcgtgacttcttcatcgatgaagacacctggcaagcggcagtgatcgaccactacgacggtcgtggccaactgtggcgcgtagcggaggcccatgccgagaactactacgacaagcaagtgccgtggtacgccctggagaccctctacgacctgcagtccggccgctacctggcgctgggcatgaagaacgaagagaagcaggcgtatgacttcggcttcaccgctaccaccagcgacttcaccccggcagccctgcgtcaggatggtgttcgctaagctgcacgcgtaactcaatgcgggagggggcaagcctcctcccacattttttgtcgcagttctttttcagtcatttgtagcaaagatctacaaacctgccgcttttaccgctagtctgcggacatctgcaatgccgaccacagccttctacaagagcccggcgatgactgatctgtcccgaatccaagggcctgccagtgcggtaatcccgaccctggaaggtcgcttctacagaccccccctgcctgacggctacgtgctgcgagcgcgcctgtgcgaacgcctgagcgccgggctggacgggcgcctgttgctggtcagcgcgccggccgggttcggcaagagttcgttggcggtggagttctgtcagagtctgccgaaccattggcacagcctgtggctgggcctgagtccacgggacaacgacccagggcgtttcctcgagcgcctgctcgacggtctgcagcaatttttcccccaactcggcgcccagtccctgggcctgctgaaaatgcgccagcgtcaccagccctttgcgtttgaggaatggctggatggcctgctcgacgagctggccgtgcacctgtccacccgtgcgccgctgttgctggtactggatgactatcacctggcccaggggccggtgcttgaccgctgcctgcagtttttccttaatcatctgcccgatggcctggtggtgctggtcaccagtcgtcagcgcccggactggcatctggcgcgcctgcgcctgtcgcgccacctgctggagttgaatgaacaggacctgcgcctgacgcacgacgaatcactggccctgctggatcgccacagcagttccctgcgcggtgaagcgctcgacaatctgatccgccgcagcgaaggctgggtcgccggcctgcgcttctggttgctggccgcctccgaggccggcagcgatggcggcttgccgcagaatctgcacggcggggaagggctgatccgcgattatctgcttgaagaagtgatcgactgtctgccggccgaagtacaggcgtttttgtacgatacagccccgcaggatcgtttttgcagcgaactctgtgatgccttgcgtgaagctcacgacagcgccgaaatcctgcgctacctgcaagcccatcaagtctttctggtgcctctggacgaacaggggcactggtaccgttatcaccacctgttttctgacctgctgcgcacccgacgcgccagtagccatgtactgccggccgccagcctgcacctgcgtgcgtgccgctggttcaatgcccagggcttgatcgatgaagcggtggagcaggcgttgcgtgccgggcacctggatgtggcggccaacctggtgcagaacctgtccgaagaacaactgctggccgagcagaatgtgggcatgttgctgcgctggaagatggacttgcccgatagcctgctgatcagcacgccgcgcttgatcgtgctgtacagctgggcgttgggcctggcttgccaattggacgcggcggaagagttatcaagctacctcagccgcttcctgccggcaccgtcggccaccgcgcaaaaatcgatgttggcgcagtggctggcactgagtgggatcatcgcccgaggcaggggggatcgtgagttgacccaacgctattgcagcgaagcgttggaaagcctgccgcaacggcgttacggccagcgcttgatgtgcctgtcgacgctctccaacctggccatcgtcgatgccgacctttggcgcgcccgtggtttgaatcgtgaatcccttgagctggcgcagcgggtaggcaacccgttattcgaggccctggcccattacgaccgtgcgcgggtgttgcaggcacgcggcgaaatcctgcgttccctggatgaggtgcgccagggcttgcagcgcctgcatggcctggcgccgcaacgcttgtacgcagtacgtgcgcggttatcgctctacgaaggtttcttgctgctggtgcgcctccagcctgaagccggcctcgctcgcttgcgcgccggcctcgccgaagcccgtgcttgccgcgatatcagcgtgttgatcggtcattgcgtgatcgccagtttcgaagggcgccggggtgacttcgccaaggccttcgccgaacttgccgaggcggagcgcctgatgcatatctgggacgtgccgccgatctactacctggcgatgatcaccctgatcaaatgcgagctgtggctggcccagggccgcaccgacctggccgacgcctggctgacccgcctggggcagacctacaacggcgaacacgctgcggccgcaccggagttccacccgcacctgccacagcatatcgggctgcaacaggctgcgctggatgccacgcgccaccaaccggctgcagcgctgcaacgccttgatgaactggcgcagcaggcgcatcacagtgggcgacagatgatcgccctcatggcgctgacccagcaggcgcagttgctgctggagagcggccaggaggccaaggcgtttccggtgctggcccaggcgctggaggcgggggtcggtggcgcgttgcaacctttccagcgtctgctggaaaaccacccggactggatgcgcgagcaactcgccaaagacccccatggcctcttgaacgagagcctgctggcgctgttgcccgccgccttggtggtggaggcggtgtcgactcaagaaaccttgagcgcacgggagctggccgtgctgcaactgatcgctcagggctgttccaaccaggagatcagcaatcggttgttcatctccctgcatacggtgaagacccatgccagccacatcaacagcaagctgggcgtcgagcggcgcacgcaggcggtggcgcgggcgcaggagctgaggttgattggctaggcctgggcttttgcgaaagccgcggccatggagtcttgttctcgctgcgaaagaccaaccgcttgagccacagtcctccaatggctgactgagttgatgcagtcagcgatgatttcatccgccttcccaaggttcacacggaagaaaccggcgacttctctcgccagttccagatccagcgcattgtcgtattcggtgatattgagtttcaggccgtctcccagtggcgtgggattcaagtcatacgcatccgaaaggcgccatccgttgcctggctccaggataaagccatgattgcgcaagtggtcgtcggtgtttgaaaccagaatattgaaaacgatgcgcgtccacagctcttgcagatcctggtcggtattcgagccgctgcgcatcagcacttcagctagctccaggtaacttgcgcctgagctggcgtcgtcaccatcgactcggcctgtgagcgtcatggcggatgcaaagtgcaggcggcccccagcagtcgtccggtcgaaacgtttgaccatgaagcaatgaaagtcgctggcatagcgcttgccgatcgccgaggcgacgttcaggccgcagcccttggccagggcgttgacgaccagctcccagccgcccacatcgtaggtgtcgcgggtcgagggaaacttggcgatccatagatggttatcgtggtcggcgacgctggctttcggacgtgcgccgcccagggaaccgccgggtgcaatcaacatgcgtagccattgccggccttctggggcctgattatccgggtcgttttccagctcgcgactggctctttccagcgcatgcagctcgacaaaaggcggcgcggcaatggcgtcctgatcatcgagaaaactgccggtatcgttcagccggtagcgtagggcgccggtgcggaagaggtcgtgtacgccaagcagatagtccgactcgccgagccgagtattcgcctcgtatagcccgtcgcggatgtcgcgttccaggcgtcgtttcatcaacaatcgcccccagcgatccgggcaggagtcgctgaagacaccaaacatgtttcgcccctcaacggggaactgagcgcctgcataggggccgatgcctggatcgatccgaacggcgctcagcacccggtcttgcaatgccagagggtcgctttcgtactcgaacttttcggtcatccgggtttttcttgcgtgcagccaaccaagacgccgggggccgtcgataccttcccagtcggcataaaccccaatcatggtcattacgtgtctgtcctttgccgtggtgggatcagtgcggccagtgcatcgctgctgagcgtgcccttgtcgggagggggcataggctttgaaggtagtggcttattgcgaacgatggcgttgtttcttgtaactttctctgacgccatcggcttattcgggcgcggggttgatgccttgcctgtcagcagtgttgcatcctgcagatgtcggcccagctcatcgtccgctgccacggtgttcaggtctttttcgaggcccagcacctgcaatatcgccaggtaagcgcccatggtactccccgaagaaccacgctccagtgcgcgaagtgtcatctgggacatgccggcgcgctcagctgcttgcttggcggtgatttttcggcgcaggcgcgcaagcttgatccgctcgccgaggtccgaaagcagacgctctgtagggggcagcaagggggcgatctttttagccatgctgttattcctgcactttttggcactaagtgaaagaataatagcatttatgttgttttctaaagtgcaattattctggcgataaagcgcgcgaagttatagtttaattgcattgaccaagattcagaggatcacccatgacgctcacggcttccacgctgattcgcgaaaccttccccgtaggccccttgcagtgcaactgcaccatcatcggcgatcccatcagcaaaaaggccatcgtggtcgacccgggtggcaaccatgagctgatcctggcgcggctcgatgctctgggcctgaaggtggtcagtattatccatacccatgcccatctcgatcatttcctggcgtccggccagttgaaggaaaagaccggcgccaccttgcacttgcacaaagaagatcaattcctttgggacaacctggaaatgcaatgccagatgtttcgcgtgccctataccccggtgccttcgccagatcgctggctggagcatgatgaagagttggcctgcggctgtggtgtggcgttgcacacaccgggacatacgccggggtcgatgagtttctggtttgccgatgccaagctgctgattgccggcgacacgctgtttcgccgcggtatcgggcgtacggatttgtggggtggagaccaggcgaccatcgtgcgttcgatcaagcagcggctgtacacgctggatgagggggcaacggtggtgaccggtcacggaccagatacccgattgggtgatgaaatgcgtgagaacccttttgtacgggcgtgacggaatgattgccgggttagaggcaagcgttgcagcaaaaactcaggtcgggttcagcgtgcgtctgctacggttgctgtagcgacggaatttttgccgtttgtcgtgttccaaactcggcacaggtccattgccaatgtcctttgcaccatagaatgcaaaagtaggagctcccttcatgttcacttcgcgtcgtctgcttgttgttgctaccgtcgtagccctgttgtccggctgcgcatcccctaacccttatgacggcagcagccaggggcaggcgagtaatgaatccggcggtatgagcaagaccgccaagtacggcggcctgggtgccctggccggtgcgctggcgggtgcagccatcgaccataacaaccgtggcaagggcgcactgatcggtgcggtcgttgcgggtgccggcgcagccggttacggctactacgccgaccagcaggaaaagaaactgcgtgaaagcatggccaataccggtgttgaagttcagcgccagggcgaccagatcaagctgatcatgccgggcaatatcactttcgccaccaactcggatgcgatctccagcagcttctaccagccgctgaacaacctggccaactcgctcaagcagttcaaccagaacacgatccagatcgttggttataccgacagcacgggcagccgccagttgaacatggacctgtcccagcgtcgtgcgcagagcgtggccaactacctgacgtcccagggcgtcaacggtgccaacctgagcgcacgcggtgccggcccggataacccgattgccagcaacgccgacgtcaacggccgcgcccagaaccgtcgtgtggaagtgaacctcggtccgatcccgggccagcagtacggccagccaggtgctcagcaacaggcgccacagcagaacaaccagttccagggcaacccgtactcgcagtaccagtaaacattcgctaataaaaaagggcgcctatgtaaggcgcccttttttgtagctgtcggttacatcagtcgatgtattcgaacaccttcacgatcttctgcacgccagacacaccctgcaccagattggctgcacgcgtggcttcggcctgggtcagcagacccatcaggtagacgataccgttgtcggtcacgaccttgatgcgcgaaccggggatcgcgttatcggtgagcatctgcgccttgatcttggtggtcagcagggcgtcattactgatggccagcagggtgattgggtccatcacctgcaattcgttatgcactttcttcacgcgctgtacggcagcggcggcttgctcggcctgggccttgaggtcggcgcgtggtgtctggccggcgagcaaaacaacgccgttgaagctggtcacgacgatgcgcgatgcaccgttgcccaggtcggtcgcggccttggcgacgttgacttcaaccttggtttcgatcagcgagtcgtcgattttgctgccgaaggtacgggtgcccttgtcatcctggataggggtgtcgcgtgttgcagtgatggccgtgctgcagccgctgatagcgaggcacagggtgatggccaaaaggctgaggcggttaacggtcattcttcactcccaaacagttggctgtcgatcagatcgcacaggcagtggatcgccagcaggtggacttcctggatacgtgcggtgacattggccgggacgcgaatctccacgtcttcaggcaacagcaatgaggccatgcccccgccatcgcgcccggtcaatgctacgacaatcatttcgcgatcatgtgcggcctggatcgcctgaataatattcgcagagttgccgctggtggaaatcgccagcagcacgtcacctggttggcccagggcgcgaatctgcttggagaagatttcgttatagctgtagtcgttggcaatcgaggtgatcgtcgacgaatcggtggtcaacgcaatggccggcaagctcgggcgctcacgctcgaagcggttgagcagctcggaagagaaatgctgggcatcgccggccgaaccaccgttgccgcacgaaagcattttgccctcgttgagcagggcgttgaccatgacctgactggcttgctcgatgtgcggtgcaagtacgtccatcgcctgttgcttggtgtcgatactggcctggaaaagctggcgaattcgggattgcatgtccatctgtgtgaccttaagtagcgcggctgtatggcacaggaatgtgcagcccgcaaagcaaagagcaaaagtgtgtggtgaagatgtccggcgaatcagctgtcgaaggcatttttgagccagttcagatcagcctgaccagacggtgtgctttctatggcaaccacatcgaaacggcagggggcgtcggcccagcgatgctctttttgcaggaagaactgcgcggcaagtatcagcttctgacgcttgcgcccgtcgatactggcgagcgcgccaccccattgtgcgtgttttctgtagcggacttcgacgaatactactgtatcgccgtcaagcatgaccagatcaagctcaccgcgtttacataaccagttctgcgccaataggcgcagaccttgtagttgcaagtacttcagggcttgcagttcggcgtccttgccgctttgtgcgctggaccgctcgggcatcagcgcggcgtgtccggcaggcgctggatctcgccaccgacaaacttggcccatggcatctggcgatcaacgcgctggttggcgctgatacccaggttgcccgacaggccgtcaacacgggtatccggcagtgccttgagttgccccaggcgcggcgccaggcggtaggcgtcgacgcccatcgcatacaggcgaccgaggctgccattggcttgtggccattgtgcagccacctggttgcgcagtgggtcggtggtgttgagcaaccaaggcgtttcgcagaacatcacgttggtcatgtccaggtactggttcttgtcgccgctggcactgaacacgtgggatgtggcgtacaccggcacgtcgccggcgtattggaagttcaaggtcggcttgatctgctgggccagttgcgggggcacggccaggaagatgaactcgatgtcctggcgacgcgacggctgcgcggctacgtcggtgccgacggtgctttgcaggctcttggcgcggccttcgcttttgcgcagctggaacagatcggcaatctgctgggcgagggcgacgggctgatcgacatattcaacccccatgacctggccgccattggcttcccagtcctggcggaaggctttgtagacacgctcaccccattcgccacgcggaaccatggcagcggcgcgatgcaggccgtcggcacgggcgcggcgcgacacttcgcgggcttcgtcttcagcggccaggccgaactggaacagttgcgccgggctgcgatcagtctcgctgtagttcaaagccagggtggtgatcggcaactgcgggcgggcactgagctgcttgaccagcggcttctccagcgggccgactaccagttgtacgccagcggcctgggccttggcgtagaagtcgtcgagggaggtcaggcgcgagctgtcatagaactcgatgaccggtggcttctgcccggcctgttcggcctggtagtgcgccgccatgaagccttcacgcagcgccttgccgacggaggccagcgggccgtcctgtggcagcagcagggcgatcttgttcaggggctggctggccagttccttgagcttggtcagtggtgtgggcagttgcacggcagccgggtggcccgggttctgtgcgcgccaggtgtcgatggcagcctgttgctgctccagcgtaccggcgcccttgaccgcttgggccagggtgatccaaccgtccaggaccggattgccgctggcttgcagctgttcggccggcacggcggcaatcagggcccagatggcttcgtggttgcttttggcggcatcacccgtgagcagtggggccatggcgacacgttcccgggcggcagccagggtctggccgtcggcctcataagcgcgggcgtgcacgctgccggtacggatctgctgttcaggcggcagctccttcaggctttgcaggctcggatggttcaaggcggtcagcgcagccttgggctggttgcgcgccatggccagttcggcggccagggtgctggcaaacacttgcgcggcgggcttgaggacatccaggggcacttgcgcaagaatctgcgacgagcgcccggggttgttctgcttgtaggccatgtctgccgcactcaggcgcagcaacgcggccttttctggcgtcttggcggtggtggcctgttcgagcagttgctcgatactggcgtccggggtccgtggaaggtcgccaaggctggacgagggcgagctggcgcacgcggccaacaaggcagcgaggcagagggcggagagcagccgcaggcaagcgatcatgtaagtgttcctgataccgatcaaattagcgtggaattgtacccaagcactggcccaggcgcgatgttactggcgtgaaaccatcgatttaggtcgtgcaaatgttgcagctggcgccaaacggctgaaaaggcatcggccgtggtggcatattttcaaggcgcctacgcgctacaatgtcgcttttgccaaccatcgaggtgtgcgttttgactgctccaggtcctttgaattccactgcaggctcgctttttgtcgtggcgacgcccattggcaacctggacgacatcagtgcccgggcactgaaagtgttgcgcgaggttaaattgatcgcggctgaagacacgcggcactcccagcgtttgatgcagcattttggtatcagcacgccattagccgcctgccacgaacacaacgagcgtgaagaaggcagccgttttatcgtgcgcctgttggccggcgacgatgtggcgctgatctccgacgcgggcacgccactgatctccgaccctggctaccatctggtgcgccaggcacgggccgctggtatcaatgtagtgcctgttccgggcgcgtgcgcgctgattgcggcattgtcggcggcgggcctgccgtcggatcgttttattttcgagggtttcctgccggccaaggccgtcgggcggcgcgcacgcctgcaagcgttaaaggaagaaccgcgcaccttgatcttctatgaggccccccatcgcatcctcgaatgcctgcaggacatggagctggtgtttggcggcgagcgcctggcactgctggcccgtgagctgaccaagaccttcgaaaccctcaagggcttgccgctggaagagttgcgtgcgtttgtcgaaggtgacagcaatcagcagcgcggcgagtgtgtggtgctggtggcaggctggaccgcgcctgaggacgaagatgcggtgggcagcgaagccatgcgcatccttgacctgctgctcaaggagatgcccctcaagcgtgcggccgccctggcggcggaaatcaccggggtgcgcaagaacctcttgtatcaagctgcgctggataaacagaaagccgaatagttccggggttgaaccggtattccgtctgaacgtgatggcaattctgaacttttattacttgtcctaagtccgccgtgccgttaacctgcgcggcggagagtcgattggacagtcgctgccctctatgaaaattaggggggggaggaaagtccgggctccatagggcgaagtgccaggtaatgcctgggaggcgtgagcctacggaaagtgccacagaaaataaccgcctaagcacttcggtgccggtaagggtgaaaaggtgcggtaagagcgcaccgcacgactggcaacagttcgtggctaggtaaaccccacttggagcaagaccaaatagggtcccaaggcgtggcccgcgctgggaccgggtaggttgctaaagatgtccagtgatggccatcgtagacgaatgactgttcaagacagaacccggcttatagatcgactctccacctttttccttctgtccgaatctcgagcagaaacccggtagtaacgcaagaatccctccctgccgaatcattggcagatgcatcttcgtaataccaaaaaaatcttactcttaataaattactttaagttcagcctatagctctttgagctatttgtgcttgttgggccaaaaacatcgccgaactctggtttctcctccctttacgctcctaaatctccgttctgtaaggcttttccttgaatccgcgccttgacggtgtggtgggcgcattcctatagtgtgcgcaagtggcggaaagtggcacaaagtgggttttttgaacgtaaaacgctaaaatttggagaaacgcatctgtgtttcgcggagctaacgctatcagtctcgatgcaaaaggccgtctcgccatgccgagccggtatcgtgacgagctcatttcgcgaagttccggacagttgatcatcaccatcgatgccgttgacccttgtttgtgtgtttacccgctcgatgagtgggagttgattgaaaccaaattgcgcgccctgccttcattgcgtgaagagaaccgccgcctgcagcgtttgctgattggtaacgccgtcgaccttgagctcgatggcagcggtcgtttcctggtgccgccgcgcttgcgcgaatacgccaagctcgacaagcgcgcaatgctggttggccaactgaacaagttccaattgtgggacgaagatgcctgggatgctgtttctgcagctgacctggctgctattcaacaaccgggcgccatgcctgatgaactgcgtgatttgatcctgtgactattgatagcggctttaaccacatcaccgtactgcttgacgaagccgttgaggctctcgccgtacgcgcggatggctgctatctggacggcacgttcggcaggggcgggcatagccggttgatactcagccagctcgggtccgacggcaaactcctcgggttcgacaaagacccccaagcgattgccaccgggcaagcgctagcggccgaagacggccgctttgtcgttgtgcagcgcagctttgccgagctgggtgccgaagtcgccgagcgcggcatggcgggcaaggtggccggggttttgctcgacctgggcgtgtcctcgccgcaactcgatgacccggagcgcggcttcagtttcatgaacgacggtccgctcgatatgcgcatggacccgacccgtggcgtcagcgccgcacagttcattgccaccgcgccggtggaagaaatcgcccgtgtgttcaaggaatacggtgaagaacgcttcgccggccgcatggcgcgtgccgtggtcgagcgccgcgaaatccagccgttcgagcgcactgccgacctggccgaagtgctgaaggtcgccaaccctgcgtgggaaaagggcaagaacccggcgacccgtgcgttccagggcctgcgtattcacgtcaataacgaattgggcgacctggaggccggcctcgaggctgccctcgaggcgctggaagtgggcggtcgcctggtggtgatcagcttccactccctggaagaccgtatcgtcaaactgttcatgcgtcgcctggtcaagggcgaatccgacaacctgccgcgcaatctgccggtacgtttcgaagcctttgtgccgaaaatcaaaatccatggcaaagcgcagttcgcctccgaagccgagctcaaggccaacccacgttcccgtagcgccgtcatgcgcgtcgcggagaagttgcggtgagcaagcttttcgccaagcccctcccgggcggcagcttctttatgttgctgctgtttgttggcgtgctgatatccgcgattgcggtgtcctacagcgcccactacaaccgccagttgctcaataccctgtacggggaattgagtgtgcgcgacaaagcgcaggcggaatggggccggttgatcctggaacaaagcacctggacagcccacagccgcatcgaagtgctggcgactgaacagttgaaaatgcacatcccgggcgcggccgaagtccgcatggtggcgccatgatgaaacttgaaggcgcactctacccctggcgcttccgcctgatgctcggcttgctggcattgatggtgggtgcgatcgcctggcggatcatcgacctgcaagtggtcgaccgtgacttcctgatcggccagggtgatgcccgtagcctgcgtcacatcccgattcctgcgcatcgcggcctgatcaccgaccgtaacggcgagccgctggctgtcagtacaccggtcaccaccctgtgggccaacgccaaggagttgcaggtcgccaaggatcgctggccggcgcttgccgccgcgctggggcaagacccgaaagccttggctgaacgcctggaagcccaggccaacaaagaattcatctacctggtgcgcggccttacccccgaacaaggccagcaggtgctcgaccttaaagtccccggtgtctacggcatcgaggaattccgtcgtttctacccggctggtgaaaccaccgcgcacatggtcggctttaccgacatcgacgaccacggccgtgagggtgtggaactcgcctacgatgaatggctcgctggggttcccggcaaacgacaagtcatcaaggatcggcgcggcagactgatcaaggatgtccaagtcaccaaaaacgccaaggccggtaagcccttggcgttgtcgattgacctgcgcctgcaatacctggccaaccgcgagttgcgtaacgcgatcatcgagaacggtgccaaggccggcagcctggtgatcatggacgtcaagaccggcgagatcctcgccatggtcaaccagccgacctacaaccccaacaaccgtcgcaacctgcagccggcgatgatgcgcaaccgcgccatgatcgacgtgttcgagccgggttcgaccatgaaagccatctccatgagtgccgccctcgaaaccggacgctggaaacccagcgacaaggtcgaggtgtatccgggtacgttgcagttgggcaaatacaccattcgtgacgtgtcccgtaccgaaggcccggtgctggatctgacaggtatcctgatcaactccagtaacgtgggcatgagtaaggtcgccttcgatatcggcggcgaaaccatttaccacctggcgcagaagatcggtttgggccaacccaccggcctggatttccccggcgagcgcgtgggcaacctgccgaactaccgcgactggaaaaaggccgagaccgccacgctttcctatggttacggcctgtcggtgacggcgatccaactggcccatgctttctctgtattggcaaataacggccgcatggttccgctgagccttatccatgtcgacgaagcgccgaaagccacccaggtgatcccggaaaacgtcgccaagaccatgcaaggcatgctgcaacaagtgatcgaagcgccacgcggtgtgttccgtgcccaggtgccggcgtatcacgtggctggcaagtcgggtactgcgcgtaagacgtcggtgggcaccaagggctacgccgaaaactcctaccgttcgctgttcgctggcttcggcccgatgagcgacccacgctacgccatcgtggtggtgatcgatgagccgagcaaagccggttacttcggtggcctggtctcggcgccggtgttcagcaaagtgatgtccggcaccctgcgcctgatgaacatcacgccggacaacctgccgccgactcaacaagcgaacgccggtccaccggccgccgctgtaaaagccaatggagggcgcggctgatgtctcttagcctgaacaagatttttgcccacgccggccgcgatctgctgatccgcgagttgagcctggacagccgcaatgtgcgcgccggtgacctgttcctggcggtgcctggcggcaaattcgatggccgtgcgcatatcgccgacgccctgcaacgcggcgcggctgccgtggcctacgaagtggaaggcgccaccgtgctgccgatcaccgatgttccgctgattccggtcaaggggttggccaaacagctctcggacatcgccgggcgtttctatggcgagccaagtcggcacgtcaacctggtcggcgttaccggcaccaacggcaagaccagcgtgacccaactggtcgcgcaggcccttgacctgctgggccagcactgcggcattgtcggtaccttgggcaccggtttctacggcgcgctgcaaagcggcctgcacaccacgccgaacccgattgccgtgcaggcgaccctggccgacctgaaaaaggccggcgcaaaggcggttgcgatggaagtgtcgtcccacggccttcaccagggccgcgttgctgcgctggcatttgatgtggcggtgatgaccaacctgtcccgcgatcacctcgactaccacggcaccatggaagcctacgctgccgagaaggccaagctgtttgcctggaatgacttgaagtgccgcgtagtgaacctggacgacgagttcggtcgccaactggccgccgaagaccgtgaatcgcgcctgatcagctacagcctggaagacgccagcgcgtacctgtattgccgcgatgcccaattcaatgacgaaggcgtgcgcgcgacgttggtgacgcctcagggcgaacatcatctgcgcagcaccttgctcggtcgtttcaacctgagcaacaccctggctgccgtcggcgcattgctcggcctggattacgctcttgacgaaatcctgcgtgtgctgcccaagctggaaggcccggtcggtcgcatgcagcgcctgggtggtggcaaacagccgttggtggtggtcgattacgcccacaccccggacgccctggaaaaagtcctggtggccctgcgtccccacgccaagggcaagttgctgtgcctgtttggttgtggtggtgatcgtgatcgcggcaagcgcccgttgatggccgagattgtcgagcgcctggccgatggcgtgctcgtcaccgacgacaacccacgcagcgaagacccgagccagattttcgacgacatccgcgtcggcttcaaagatgtgtccaaggctacgtttgtagccggtcgtggcgcggccatcgcccaactgatcgccagcgccagtgctgatgacgtggtggtgctggccggtaaaggtcacgaggactatcaggaaatcaacggcgaacgccatgccttctccgatctggtcgaggccgatcacgccttgaccgcctgggaggttgcccatgcttaaaccgatgacattcagcgaactgacccaggccctgtcggcccgtgtactgtccagcgattgccgcttcgacggcgtgagtatcgacagccgcaacatcaagccggggcaactgtttgttgccctggctggcccacgtttcgacggtcacgactacctgaatgaagtcgccgccaaaggtgccgtgggtgccttggtgcagcgcgaagtcgcggattccacgctaccgcagctgctggtcgccgatacccgcctggcccttggccaattgggtgcgttgaaccgtgccgcgttcaccaaccccgttgcggccatcacgggctccagcggcaagaccacggtcaaggagctgctcgctggtgtgttgcgcacgcgcggcccggtgctcgccacccgtggcaacctgaataatgattttggcgcaccgctgaccctgctcgaactggcaccggaacacaccgcggcggtgatcgagctgggcgcgtcgcgcatcggcgaaattgcctacaccgtggcgctgaccaagccccacgtggcgatcatcaacaatgccggaaccgcccacgtcggtgagttcggtggcccggaaaaaatcgttgaagccaagggtgaaatcctggaaggcctcgatgcatcgggcaccgctgtactgaatcttgacgacaaggccttcgaaacctggcgtgttcgcgcagccggtcgcaaggtcctgacgtttgccgtgcgcaacgctgcggctgattttcatgcgtccgacattaccgtcgacgcccgtggttgcccttcctttaccttgcacaccccgcagggcaatgagcacgtgcagttgaacctgctgggcaaccataacgttgccaatgccctggccgccgccgctgccgcctacgccctgggcgtgtcgctgttcggcatcgccaccgggcttggcgcggtgcagccggtcaagggtcgtaccgtggcgcagctggcaaccaatggcatgcgcgtgatcgatgacacttacaacgccaaccagtcctcggtctgcgccgccatcgacctgcttaaaggcttcgacggccgcaaggtactggtgctgggcgacatcgccgagctgggcgactgggctgaacagtcccaccgtgaggtcggtgcctacgctaccggcaacgtcgacgcgctgtacgccgtcggcccgaacatggcccatgccgtcaatgcgttcggccccggtgcacgtcatttcgcgacccaggccgagctgatccaggcgctgacgacggctgaacacgacaaacatacaaccattttgatcaagggatcgcgcagcgcggtgatggaaaacgtcgtcgcggccttgtgtggctcaagtacggagaaacattaatgctgctgctgctggctgagtatctgcaacagttccacaaaggcttcgcggtctttcagtacctgaccctgcgcgggattctgggtgtgctgaccgcgttgtgtttgtcgctgttcctggggccgtggatgatccgcaccctgcagaacctgcaaattggtcaatcggttcgtaatgacggcccgcagtcgcacctgtccaagtccggcaccccgaccatgggcggtgcgctgattctgtcgtccatcggcgtaagcactttgctgtgggccgacctgcacaaccgctacgtgtggactgtgttgttggtgacgttgctgttcggcgccatcggttgggtggatgactaccgcaaagtgatcgagaagaactccaagggcctgccaagccgctggaagtatttctggcagtcggtgtttggcctcgccgcggcgatcttcctctacaccactgcgcccagcgcagtggaaacgaccctgatcatcccgatgctcaaggacgccagcattcccctgggcattggcttcgtggtgctgacctacttcgtgatagtcggttccagcaacgcggtcaacctcaccgacggcctcgacggcctggcgatcatgccgacggtgatggtgggcggcgcgctcggcatcttctgctacctgtcgggtaacgtgaagttcgccgaatacttgctgatcccttacgtaccgggcgcgggtgaattgattgtgttctgcggcgcgctgatcggtgccggcctgggcttcctgtggttcaacacgtacccagcgcaagtgttcatgggcgatgtcggcgcactggcgctgggcgcggcccttggcaccatcgcggtgatcgttcgccaggaaatcgtgctgttcatcatgggcggtgtgttcgtgatggaaaccctgtcggtggtcatccaggtggcgtccttcaaattgaccgggcgtcgagtgttccgcatggcgccgattcaccaccactttgaactcaagggctggcccgagccacgcgtgattgtccgcttctggatcatcaccgtgattctggtgctgattggccttgccaccctgaaactgaggtagaaacgagtgtccctgatcgcttcagaccacttccgcattgttgtcggcctcggcaagagcggcatgtccctggttcgcttcctggcgaaccggggcacgtcgtttgccgtggccgatacgcgggaaaatccaccggagctggtcacgctgcgccgtgactacccgcacgtggaagtgcgttgtggcgagctggatgtcgagtttctgtgccgtgccgacgagctctacgtgagccccggcctggccctggcgactccggccctgcaagccgccgctgcgcgtggcgttaagctgtccggcgatatcgacctgtttgcgcgtaacgcgaaggcgccgatcgtggccatcagcggttccaacgcgaaaagcaccgtgaccaccctggtcggcgagatggcggctgcggccggcaaacgcgtggccgtgggcggcaacctcggcacaccggcgctggacctgctcagcgatgacgtcgagctgtacgtcatggagttgtcgagcttccaactggaaaccacccacgacctcggtgccgaagtggccaccgtgttgaacgtgagcgaggaccacatggatcgctacagcggcctgccggcgtatcacctggccaagcaccggatcttccgtggcgcacggcaagtcgtggtcaaccgccaggatgccctgagccgtccgctgatgggcgagggcctgccttgctggaccttcggcctcggcaaacccgatttcaaagccttcggcatccgcgaagagaacggcgaaaaatacctggccttcgaattccagaacctgatgccggtgcgcgagctgaaaattcgtggcgcccataaccagtccaatgccctggcggccttggcactggggcatgccgtcggcctgccgtttgacgccatgctctcggcgctgcgcagctttggcggtcttgaacatcgctgccagtgggtgcgcgaccttgatggcgtcagctattacaacgattccaaggccaccaacgtcggtgcagccctggcagccatcgaaggccttggcgccgatatcgacggcaagctggtgctgatcgccggtggcgacggcaagggtgccgacttcaaggaccttaaaggcccggtggctgaacattgccgcgccgtggtgctgatgggccgtgattccgatctgattgccgccgccctcggtgacgctgtaccgcaagtgcgagctacgtccctggacgacgccatcgcccgttgcaaggccctggctcggcccggcgatgcggtgctgctgtcgccagcctgcgccagtttcgacatgttcaagaactacgaagagcgcggccagctgttcgcccgcgccgtggaggccttggcatgaatttccggaatatcatcaagccgtatccgtcgccgatcatcaccgggcgcggtatcgacctcgatttcccgatgctcgccggttgcctcgccttgttgggcctgggcctggtgatgattacctcggcgtcgtccgaagtggctgccgtgcagtcgggcaacaccctgtacatgatgatccgtcacctggtgtacctggtgatcggcctcggcgcgtgcatcgttaccatgatgatccccatcgccacctggcaacgcctgggctggctgatgctgatcggggcgttcggcttgctgatcatggtgatcctgcccggcatcggccgcgaggtgaacggttcgatgcgctggatcggctttggcgcgttcaacgtgcagccgtcggaaatcgccaaggtattcgtggtgatctacctggccggctacctggtacgccgccagaaagaagtgcgcgagagctggatgggtttcttcaagccgttcatcgtgctgctgcccatggctggcctgctgctgatggagcccgacttcggtgccaccgtcgtgatgatgggcgctgctgcggcgatgctgttccttggcggcgtgggactgttccgcttcaccttgatggtggtgctggccgtggcggcagtgaccgtcctggtgcaggcacaaccctaccggatggcgcgtctgatcacctttaccgatccctgggccgaccagttcggttccggctaccagttgacccaggcgctgatcgcctttggtcgcggcgagtggctgggcgtgggcctgggcaacagtgtgcagaagcagttctatctgccggaagcgcacaccgacttcgtgttctcggtactggccgaagagctcggtgtggtgggttcgctatgcaccgtcgcgctgttcgtgttcgtgtgtgtacgcggcatgtacatcggcctgtgggccgagaaggccaaacagtattttgccgcctatgtggcgtacggcttgtcgttcctgtggatcggccagttcctgatcaatatcggtgtgaacgtcggcctgttgccgaccaagggcctgaccttgccgtttctcagttacggcggcagttcgttggtgatctgctgcgcgtgcctgggcttgttgctgcgcatcgagtgggagagtcgaacccatttgggcagcgaagagatggaattcagcgagagcgatttcgccgaggagccgacccatgggcgctaacgtgctgatcatggcgggcggtaccgggggccacgtgttcccggccctggcctgcgcgcgcgaattccagaaccgtggctacaccgtgcactggttgggtacgccgcgcggtatcgaaaacgagctggtgccgaacgccggtttgccgctgcacctgatcaacgtcaccggtctgcgcggcaagggcaagttgtccctgctcaaggcgccgttcgtgttgctcaaggcggtgtggcaggcgcgcaagatcattcgtgaactgaagccggtgtgtgtgctcggttttggtggctatgtgaccggcccgggtggcgtcgccgccaagctcgccggtgtgccggtgatcgtgcacgaacagaatgccgtcgccggcaccgccaaccgcctgctggtgcctctggcggcgcgggtgtgcgaggcctttccgaagacctttggtgcatcggacaagctgcgcaccaccggcaacccggtgcgtaccgaactgttcatgggcatcgcccgtgaagcattggccgggcgcaaggcgcacctgctggtcatgggcggcagcctgggctccgagcctttgaacaaactgctgccggaagccctggcacaactgcctgtggagctgcgtccagagatcttccaccaggccggcaaaaaccacggtgaagtcaccgccacgcgctatcgcgaggccggtgtggaggcgaacgtacagcccttcatcaaagacatggcccatgcctatggctgggccgacctggtggtctgccgctccggtgcgctgaccgtcagtgaactggccgccgccggtctgccgtccttgctggtgcctttgccccatgcgatcgacgatcaccagacccgcaacgctgaatatttggccggggagggcgctgccttcctgctgccgcaaagaacgactggcgccgccgacttggccgcacgcctgaccgaggtattgatgcaaccggaacgactcaacagcatggcgagtactgcaagccgcctggccaaacctgacgcaacccgcaccgtggtcgatatctgcctggaggtggcccatggttgagaatcagaaagccatgccacagccggaaatgcgccgtatccgtcgcatccacttcgtcggtatcggcggcgtgggcatgtgcggcattgctgaagtattgctgaacctgggctaccaggtgtccggctccgacttgaaagagtcgccggtcaccgaccgcctgaagtcgttcggcgcgcagatctttatcggccaccgtgccgagaacgccgccgaggccgacgtgctggtggtgtccagcgccgtgaacacctccaacccggaagtggccaccgcccttgagcgccgcattcccgtggtgcctcgcgccgagatgctggccgagctgatgcgctatcgccacggcatcgccgtcgccggtacccacggcaaaaccaccaccaccagcctgatcgcctcggtgttcgccgccggcggcctggacccgacgttcgtcatcggtggccgcctgaatgcagccggcaccaatgcccagctcggcaccagccgctacctgatcgccgaagccgatgaaagcgatgcgagcttcctgcacctgcagccgctggtggccgtggtcaccaacatcgacgccgaccacatggcgacctacgacggtgacttcaacaagttgaagaaaaccttcgtcgaattcctgcacaacctgccgttctacggtttggcggtggtgtgcctggacgatccggtggtgcgcgaaatcctgccgctggtcaagcgtccgaccgttacctacggcttcagcgaagacgccgacgtgcgcgccatcaatgtgcgccaggaaggcatgcaaaccttcttcaccgtactgcgtccggaccgtgaaccgttggatgtctcggtgaacatgccgggcaaccacaacgtactcaattctttggcgaccatctgcatcgctaccgacgagggcgtcagcgatgaagccatcgtcgaaggcctgtcgcgctttgccggcgtgggccgtcgcttccaggtctacggccaactgccggtagagggcggcgacgtgatgctggtggacgactacgggcaccacccgactgaagttgccgcggtgatcaaggccgtgcgcggtggctggccggagcgccgcctggtgatggtgtaccagccgcaccgctacagccgtacccgcgacctgtacgacgatttcgtcaatgtactggccgatgccaacgtgctgctgttgatggaagtctaccccgccggtgaggagcctatcccgggggccgacagccgcaagctgtgcaacagcatccgtcagcgcggccagttggacccgatctacatcgagcgtggcgtggacctggcgccaatcgtcaagccgctgctgcgggccggcgacatcctgctgtgccagggcgccggtgacattggtggccttgcgccgaaattgctggcgagcccgctgtttgcggcaaaaaagggagcggcgaaatgatcactgactacgcctccctgttttccacgatcacgcctgccgacttcggtcgcgtagccgtattgttcggcggcaagagcgccgagcgcgaagtctcgctcaagtccggcaacgccgtgctcgaagcactgcaaagtgcgggcgtgaacgcgttcggcatcgacgtgggtgatgacttcctcgcccgcctgcaggccgagaagatcgaccgcgctttcatcatcctccacggccgtggcggtgaagacggcagcatgcaagggctgctggagtgtgccggcattccttataccggcagcggcatcctggcttcggcgctggcaatggacaagttgcgcaccaagcaggtgtggcacagcctgggcattccgaccccgcgtcacagcgtgctgtgcagcgaagacgattgtatttctgcagccaaggaactgggcctgcctttgatcgtcaaacctgcccatgaaggctccagtatcggcatggccaaagtgaactcggccgccgaattgatcgacgcatggaaagcggcaagtacctacgattcgcaagtgttggtggaacagtggatccagggtcccgagtacaccatcgccaccctgcgtggccaggtattgccgcctatcgcattgggcacgccccacaccttttacgactacgacgccaagtacctggcttccgatacccagtaccggatcccgtgcggcctcgacgcagccaaggaacaggaattgatggacctcacggcgaaagcctgtgaggcgctgggtatcgccggttgggcgcgggcagacgtgatgcaggatgaccaagggaatttctggttcctggaagtcaacactgcaccgggcatgaccgaccacagcctggtacctatggccgctcgcgctgcgggcctggacttccagcaactggtgctggcgatcctggctgcaagcattgagccacgaggctaaggacatgaaaggcgcatcgcttcgtcatcagcccccacaagcaccgagccgcaagccggtgccacggggtgccagccgaatggtggctaaagagccgatgtcggcgcgcctgccgaaagccaactttggtttcctcaaggcgttgtactggccggtgttgctggtggtcttgggcttcggaacctacgagggcgcgcagcgtctgttgccgtatgccgaccggccgatcaccaagatcagcgtgcagggcgacttgagctacatcagccagcaagcggtacagcagcgcatcggcccgtacctggcggcgagcttctttaccatcgacctggccggcatgcgctcggagctggaacagatgccgtggatcgcccacgccgaagtccgccgcgtatggccggaccaggtgacgatccgcctggaagagcaactgcccgtggcccgttggggtgacgaagcgctgttgaacaaccagggccaggcgttcaccccgcgtgagctggccaactacgagcacctgccgcagctcttcgggccgcagcgggcgcagcagcaagtgatgcagcagtaccaggccttgagccagatgctgcggccactgggcttctccattgcacgcctggaactgcgtgaacggggcagctggtttttgacgaccggggcaggcagttccggcccgggcatccagttgttgctgggacgcgaccgcttggtggaaaagatgcgccgcttcattgccatctatgacaagaccttgaaagaacagattacgaacattgcgagcgtcgacctgcgttacgccaacggccttgccgtcggctggcgtgaaccggctgcgcccacggcagcgcaacccgctgtcgcgaagaattaagaagaggcaggacccatggcaaacgtgcaaagcggcaaaatgatcgtcggtctcgatatcggcacctccaaggtggtggcgctggtgggcgaggtcggggaagacggcacgatcgaaatcgtcggtattggcacgcatccgtcccggggcctgaagaagggcgtggtggtgaacatcgagtccaccgtgcaatcgatccagcgcgccatcgaagaagcgcagctgatggccggttgccggatccactcggcgttcgtcggcgtggcgggtaaccatatccgcagcctgaactcccacggcatcgtggcgatccgcgaccgcgaagtcagctcggccgacctcgagcgcgtgctcgacgctgcccaggctgtggcgatcccggctgaccagcgcgtgctgcacaccctgccgcaggactacgtgatcgacaaccaggaaggcgtgcgcgagcccctgggcatgtcgggcgtgcgcctggaagccaaggtccacgtggtgacctgcgccgtcaacgccgcacagaacattgaaaaatgcgtgcgccgctgcggcctggaaatcgacgacatcattctcgagcagttggcctcggcctactcggtactgaccgacgacgagaaagagctgggcgtgtgcctggtggatatcggcggcggcaccaccgacatcgcgatcttcaccgagggtgcgatccgtcacaccgccgtgatcccgattgcgggtgaccaggtgaccaacgacatcgccatggcgttgcgcacaccgacccagtacgccgaagaaatcaagatccgctacgcctgcgccctggccaagctggccggtgccggcgagaccatcaaggtgccgagcgtgggcgatcgtccaccgcgcgaactgtcgcgccaggccctggccgaagtggtcgagccacgctacgacgaactgttcaccctgatccaggctgaactgcgccgcagcggctacgaagatttgatcccggccggcatcgtgctgaccggtggtacctcgaaaatggaaggcgcggtcgagctggccgaggagatcttccacatgccggtccgtctgggcgtgccccatggcgtcaaaggcctgggtgacgtggtacgcaacccgatttattccaccggtgtgggcttgctgttgtacgggctgcaaaagcagaccgacggcatttccctgtcgggcccgagcaaccgtgacagctaccgcagcgacgacgaggccaaggcgccgttgttcgagcggttgcaggcatgggtcaaaggcaacttctaacgatttaccgcgacaccgcaacaccgttgtaagcagtaggcgaaaaaactagagaaatgaaaggagagggaacatgttcgaactcgtagacaacatccccgcaagcccggtcatcaaagtgatcggtgtcggcggtggcggcggcaacgctgtcaaccatatggtcaagagcaacattgaaggcgttgaattcatctgcgccaacactgatgcccaggcgctgaaaagcatcggcgcgcggaccatcctgcaattgggcactgcggtaaccaagggccttggcgctggcgccaacccggaagtcggccgtcaagccgcgctggaagaccgcgagcgtatcgctgaagtgctgcaaggcaccaacatggtgttcatcaccaccggcatgggcggcggtactggtaccggtgctgcgccgatcattgccgaagtggccaaggaaatgggcattctgacggttgctgtcgtgacccgtccgttcccgttcgaaggtcgcaagcgcatgcagatcgccgacgaaggcatccgtctgctgtctgaaagcgtcgactcgttgatcaccatccccaacgagaagctgctgaccatcctgggcaaggacgcaagcctgctgtccgctttcgccaaggctgacgatgtactggccggtgccgttcgcggtatctccgacatcatcaagcgcccaggcatgatcaacgtcgactttgccgacgtccgtaccgtgatgagcgaaatgggcatggcgatgatgggcactggctgcgccagcggtccgaaccgtgcacgtgaagccactgaagcggccatccgcaacccgttgctggaagacgtgaacctgcaaggcgcacgcggcatcctggtgaacatcaccgccggtcctgacctgtccctgggtgagtactccgacgtgggtagcatcatcgaagccttcgcttccgagcacgccatggtcaaggtcggtaccgttatcgatccggacatgcgcgacgagctgcacgtgaccgtggttgcgaccggcctgggcgcgaaaatcgagaagcctgtgaaggtcatcgacaacaccctgcacaacagccaaaccagccacgccagccaagcggctgccgctccagcgccttcgcgccaggaactgccgtcggtgaactaccgtgatctggaccgtccgaccgtgatgcgcaaccaggctcaggccggtgctgcggcgtcccgtagcccgaatccgcaagatgacctggactacctggacatcccggcattcctgcgtcgtcaggccgattaatggaatgtatcagggctatgaaggtgattggtgttcagcaaaggtctggtctgctattatcgccagcctttgttgataccagttcgcaatttgcgctgaagcggtccaagccatgattaaacaacgcaccctgaagaatattattcgtgccacaggtgtaggtctgcactccggggagaaggtatacctgaccctcaagcctgcacctgtcgacaccggcatcgtgtttgtgcgtgccgacctggaccctgtggtgcagattcctgctcgcgcggaaaacgttggcgaaaccaccatgtcgaccacattggtcaacggtgacgtcaaagtggacacggtggagcacttgctctcggccatggctggcctgggcatcgataacgcctacgtcgagctctccgcgtccgaagtcccgatcatggatggcagcgctggacccttcgtattcttgattcaatctgccggcctggaagaacaggacgcagctaagaagttcattcgcattctgcgggaagtgacagtagaagacggcgacaagcgcgccaccttcgtcccgttcgaaggctttaaagtgagctttgagatcgatttcgatcacccggtattccgtgaccgcacccaaagtgcaagcgtggatttttccagtacttcgttcgtaaaagaagtcagccgcgcccgtacctttggtttcatgagtgacatcgagtacctgcgcaagcacaacctcgcactcggcggcagcgttgaaaacgccattgtggtcgacgcggatggtgtactgaacgaagacggccttcgctacgaagacgaattcgtgaagcacaagatcctcgatgccatcggtgacctctacctgctgggcaatagcctgataggcgagttcaaaggcttcaagtcgggccacgcccttaacaaccagctgctgcgcaagttgattgagcagacagacgcttgggaagtcgtgaccttcgaagatgccagcaccgcaccgatctcttacatgcgtcccgttgcggcggtgtaagtaacaactctctttctttagttttgaaaggctgccttcgggtggcctttttttatgcgcactttttctgactctgcctcggttcaggggtgggagggggcttgcccccgattgcagcgggtcaggccaggcatttgtcactgatgcaccgccatcgggggcaagccccctcccacattaggtcgggtttattatttagagggttgcggaatcgacaatgcggtttcttccgctgtgcttggcctcatacagcgcctggtccgcactcagcagcaacgcctccagcgactggcgactgcgcttgtcccacgtactcatgccaatactcaccgtaatcggctgctcatcaccctccactcgcggcaagtgctcgacaccgctgcggatatgctcggcgatcaccgaggcacccttggcgtcggtcaccggcagcaccactgcaaactcttcaccgccatagcgtgccgccaagtcggccgggcggcggatgttggtaccgatcacttgggccacgttacgtagtgcctcatcaccgccatgatgaccatgacggtcgttgaacgccttgaagtggtccacatcgatcatcagcaccgtgagcggctcggtcgagcgttgggcgcggtcccactccaggcgcaggcgttcgtccagcacgcggcggttggccaggcccgtcaacgcatcggtggctgccagttctgacagtacccgttcagcgcgccgccgccgtcgcagttcccggcgtagcatccaggtcagccacaacaaaccggcacagagcactccggttgcactactggtcagcagtgccacgcgactccagggcgcgaatacgtcctcgctggacagcgccacgaccacgatcagcggcagttcaccgacattggtaaaggtatacaggcgttctttgccactgatggcagagatcgcctgaaagctgccgcttccgtcacgcagtattcgcttgaagttgggtcggtcactgaggtccttgtcgatcatgtcgcgttcgagcagcggctgctgggccaggagaatgccattcctgctcagcaggttgacgctgctgccgttgccgatggtcagggtgttgaagagctgatcgaaatacgccaggcgcatggtcgcaaccgccacgccggcaaactctcccttggggcccgacacacgtcgactgaatgccatgcgccagacctggtcgcagtcgcaacggaccttgaacggccgactgataaacaagccggcgttggcgtccttggcatgcacctggaaataatcgcggctggcaaaattacgcggcgtgggccgcagcgtggaggagtcggcgataaccgtaccggtggtgtccagcagcaggacctcgcctttgaaaggcgccgccgtggacaaatcaaactgcaccaggtgctggatattggcggcaacctgggacaggtcttcgcgttgcgtggccgcaatcagaccgttgagcgccatgtcatacagttcgacgttacgcagcacgtcggcattgatcaattgggcgatgttggtggtagaccgcttggccgcttcgagcgtgctggcgtgttcgcgcatcaacagcaccgcgacaatgatcacaatcagggcgacgctgagcccgctgcccaggatcagtaacaactcagggtgtgcgggtgaggtacgaacagggcgtggactcatcgggcagacttcagcggtgaggatgctggcagtttagttctaccagatgaaaattaaatacttggttaaaaagaaaaaatcacccctcagaacacgttgatcggatagtcgacgatcacgcggtactcgtccacatcccgatccaccgccgcgtagccattgccaccgcggttggtcgcccattgcaggcgcaccgccaggtccttggccttgccgccctgcaccacgtatttcacgtcgatgtcgcgttcccagtgcttggcatctttgccatcggcgctgtaccaggcgctgtagccacggctttgcggatcaaccttggtcaggtcggtcttgccgctgatgtaggacaccgccgaggtcaggcctggcatgccgaggccgacgaagtcataggcgtacttgagcttccatgagcgttcgttggggccgttgaagtcggagtactgctgggagttgtccaggtagacgctgtcaccttgggcgatgtagtcgaacggcgtgttgccgttgacccgctggtaggtggcggtgacgctgtggttgcccacgcccacggtgaaatgcaggctgtaggtgttgttgtcgatgctgccgagcagcgactggccggtgtcctgggtgtggtagtagtgcaggcccgggttgaggctgaccaggtcattcagcgcataggtgtagtccaggtcgtagtagtactggttccacacatccttgagttcggcggcgtaaaggttgctggtcagcccgtcgatgccgctgaacgacacgccggcccagttcatgtgctggctgtcggcagtgttgggcagcgcgccgtagctggtgccgatgcggcgatggccgctctggttgtagagcttggtgaaactggcctggccgccttcgaacacccagccgtcgaggctgaggttggtcaggctcacgccacggaaggtctgcggcagcatgcgtgtcgcgccgccggcgatcaccgggttattgaggaacagatcgccggctttcagctcggtatcgaacgcgcgcattttcaaggtgccgcctgccgtggagaacgagccgggtgccttgccgttgccactgccatacggaaggatgctggaaccatcggtgccgccaccgccgtcgagcttgaggccgagcatggcatgggcatccaggccgaagccgacggtgccctgggtgtagccggattcgaagatgccgatgaaaccctggccccactctttgctgtcatcggtgtggatgtcgcgccggtcgcggttcatgtagtagttgcgggtgttgatgttgaggtgggcgccttcgacgaaaccgtcggcgggggtggtgtctgccgcgtgggcaagggaggtaatcgttgcggctactgcgaggaataacggggtgaacgtcagcgagttcttcaccggtggagctcctttggtcaatcggaaacagccagtgtcgttgggggtgcctggccttttttgacggcaaaaaaaagccgctgaaggtcagcggctttaagacagattcccagtgtagagccctggaaataagtcgagggaaattcgggtaagcgggaaagctgtctttgccgtcgcgctcatcgatgcgtcaaattaacgcaggcgagcggtgcggtacagagtgtaacaagataatgactgttgcccaaatcgcaacagtgatggtgtgaagggcaatgtgggagggggcttgcccccgatggcagtgtgtcagccagttcatgggtaactgacgctccgctatcgggggcaagccccctcccacaggttggctgccgtgttctcaggagattcagaggggcagggtaataccgaaggtattgccaccgccgtcgctgcgtacgaacacatccccgccatgcatcaacgcaatcgccttgacgatcgccagccccagcccgtgattcgcaccgctgttgctgcgcgacgcgtctacccgatagaagcgttcgaacaggcgcggcaggtgctcgctggcaatcgcatcgccggggttggtcacaccgatagagacctgatgcgcctgcacctcgatgttcacggcgatgacctggccgggcgcggtgtgctgcaccgcattgctcagcaggttgatcagcgcgcggcgcaggtgggccttctcgatctgcaccagggcgtcaccgtggacctgcacctggacctgggcgtcttcgaggatgaagtccaggtagtccagggtcgtggccacttcgtcggccagggagctttcgatcagcttggtggctttgctgccctggtcggcgctggcgaggaacagcatgtcgttgatgatcgaacgcaggcgctccagctcttcgaggttcgattgcagtacctcgaaataatgctcggccgagcgccctcgggtcagcgccacctgggtctggccgatcaggttggtcagcggcgagcgcagttcatgggccacatcggcgttgaacgactccaggcgcgaataggcttgctcgacgcggtcgagggtggagttgaacgaattgacgaactggctcaactcggggggcaacggcgacagctgcaggcgcccggagagcttcggcggcgcgagtttctgcgcttcgtccgagagtttgcccagcggtttgaggccgatgcgcgccacccagaaccccagcaacgatgccagcaccacgcctaccagagccaggctgatcaacgccaccagcaggtgatgctgggtggcgcggaagttctcggtgtcgatggcgatcatgaagcgcagcggcgggcgttgatccttggccgggaactggctcaccagtaccttgaacgggtgtttgtcgccggccaggcgcaagtcgcgcttacctgtgcgtccttcggcgaaggcgcggatctgcgcatctgggttgccgtactcgtagttcgggtcgctgctcacgacccagaagcggatgcgtttgtcttcctcgctcagcaacttgagcttggcctgtatctttacccaatggtccggtgtaccgaagcgattcaccgacgattcgagcacgctgtagcgcgcctccagttcggcgcccggcagcaggccaaggctgcggtccacctgttgatagagcgcgccgccaatcaacaggaagatcagtgccgccaccagggtgaacatgctgctcaggcgcaaggcaatcgagttagccgacactgcgactctccaacacatagcccatgccgcggatagtgtgcagcagcttggtgtcgaacggcccgtcgagcttggcgcgcaggcgcttgatcgcgacttccaccacattggcatcgctgtcgaaattgatgtcccagaccatttctgcaatcgctgtcttggagaggatttcgccctggcgccgtgccaatacgctgagcagcgagaactccttcgcagtcaggtccagacgctggccgttgcggctggccttgcggctgatcaggtcgatccacaggtcggcgaccgtgacttgcaccggctcgtgcccgccactgcggcgggtcagggcttgcaggcgcgccaccagttccaggaacgaaaacggcttgcccaggtaatcgtcggcgccttcgcgcaggccgcgaatacggtcttccacgcgctcacgggcggtcaacatgatcaccggtgtctgcttgcgcgcacgcagcgcacgcaacacgccgaagccgtcgaggccgggcagcatcacgtcgagcacgatcaccgcgtagtcgttctccagcgccaggtgcaggccttcgacaccttcgcgggcgacatcgaccgtatagccttgctcggtcagaccgcgatgcaggtagtccgcggttttttcttcatcttcaataatcaggacacgcatgagtcttttgctccagggccgggcctcagtgtgtgctcgccagcgcaggcgttggtttgggccggtggaaaaacttctcgaggtacaagtatatgaccggtgtggtgaacagcgtcagcgcctggctcaccagcaagccgccgaccaccgcgatccccagcggctggcgcatctccgcaccggggccggcgccaagcatcagcggcaccgcgccgagcagggcggcgagggtggtcatgatgatcggccggaaccgtgtaacgcaggcttcatagatcgcatcttccggcgacaggcccctgacacgctgagcctccagggcaaagtcgatcatcaggatgccgttcttcttcacgatgccgatcaacagcaccaggccgatcaaggccatgatcgaaaagtcctggcccatcagtgacagcatgatcagcgcgcccaaccccgctgacggcaaggtggagatgatcgtcaacgggtgcacgaaactctcgtacagcacgccgagaataatgtagaccgccaccagtgccgccaggatcagccacggctggctggccaacgaactctggaatgcctgggccgcaccctggaagttaccgatgatggtggtcggcatgccgatttcattcttggcctggttgagcatgatcactgcatcgcccaaggccacccccggcgccaggttgaatgacaggttggcggccgggaacatgccgtcgtggctgatcgaaagcggccccactgtgggcgggtcaaccttggccagcgccgacagcggcaccatctcattggtcagcggcgagcgcaggtaaaagtagttgaggctttcggccttgccgcgttgctgggtgtccagttccagcaccacttggtactggttgatctcggtctggaactcgttgatctggcgttggccgaaagcatcgtacagcgcctgatccacatcggtggcggtcaggccgaagcgtccggcggcctggcggtcgatgctgatgtgggtgatgctgccgcccagttgcaggtcgttggacaggtcgcgaaaggccgggttggcgcgcagtttttcggtgaggcgctgggtccaggtattcagcgtcgggccgtcattgctcttgagcacgtactggtactgggcgcggctggggccggaactcaagttgatgtcctggccggcacgcagatacagcacgatgcccggcaccttggcgagtttcggccgaatgcggtcgatgaactggctggcggacacatcgcgatcaccccggtctttcaaggcgatccagaaacggccgttggcgatggtctggttgctgccggtcacgcctaccgagtgcgaaaacgcttgcaccgccgggtcggccttgacgatctcggccagggccttgtgcttggcgaccatgtccgggtacgacacgtcggccgccgcttcgctggtgccgagtacaaagccggtgtcctgcaccgggaagaagcccttggggataaacacatagccgaccacggccagggccagggtcaccacgaagatcgccgccatactgcgttgatgggccagggcgcggcgcaggttgcgtgcgtagccggccaacagacgctcgctgaaacctggtttgtcgtgggcgtgatgggtgggcgctcgcatgaacagcgctgcgagtgtcggcgccagggttagcgataccaccaccgaaatcaggatggtcgaggtggctgtcagcgcgaattccttgaacagccgcccgaccacgccgcccatgaacagcagcggaatgaatgccgccaccagcgagaagctgatggacaccacggtaaagccgatttcaccggcgcccttgatcgccgcttcgcgcttgtcgaggcccgcctccagatgacggtgaatgttctccaccaccacgatcgcatcgtccaccacaaagcccacggcaatcacgattgccaccagcgtgaggttgttcaggctgaagcccatcaggtacatcagcgcaaaactggcgaccagcgacacgccgagcacactggacacaatcatcgtcgccgataattggcgcaagaacagcgccatcaccgccaccaccagcaggatggcaatcagcagggtcacttccacttcgtgcagggaggcgcggatggtcttggtgcggtcggtcaacacgctgacctgcaccgacgccggcagcatggcttgcaggcgcggcagctcggcttgaatacggtcgacggtctcgacgatgttcgcgccgggttggcgcgagatcaccaggttgaccccgggcgtgtcgccggaccaggcctgcacgtaggcgttttccgaaccgttgatgaccttggcgatatcgcgcagttgtaccggtgcgccgtccttgtaggacacgatcaattgcgcgtagtcctccgggtggaacaactggtcgttggtcgacaaggtcgacacgctgttctggccgtagatcgcgcccttggccaggttgaggctcgattgctggatggccaggcggatatcggcgagggtcaggccgatggcggcgagtttgtccggggacgcttgcacgcggatcgccgggcgttgctggccggtgatgttgatctggccaacgccgtcgatctggctgatctgccgggccagcagggtttccacgtagtcgctcagttcggtgctgggcatgctgttggaactgacgctgaggatcagtaccgggctgtccgccgggttgacctttttccaggtcggcaggctcggcatatcgctgggcagcttgccggacgcggtgttgatcgcggcctgcacttcctgggcggcggtgtcgatgctcttgttcagggtgaactgcagggtcagcaggctggagcccaaggcactgctggaggtcatctgggtcatgccgggaatggcgctgaactgcacctccaaaggcgtggccacggacgaggccatggtgtccgggctggcgccgggcagggtggcggtgacctggatcgtcggaaactccgcttccggcagtggggcgatggccaggcgcgggaaggcaatcagcccaagcagcaccagggcgaaggtcagcagcagggtggcgaccgggtggtcgacgcaccaggctgatggcgaacggctcatggccgcaccttggcatcgacggtctggatgacctgcggcggttccttgagcacctccacctgcgccccggccttgagccgcgactggccgtcactgaccagcacatccccggcctgcacgcccttgatgatgttgaggtcgctgtcctggtacgtcacctgcaccggcaccacctcgaccttgtcaccgttgacccggtacacgaagtgcgaatccaggccgcgctgcaccacggtcggcggcaccaccagcgcgtttttgtcgagggcggtctggatcttgatggtcaccagttgccccggccacaggcgttgtgaggcgttgttgaattcggccttggcgcgcagggtgccggtggtggagctgatctggttgtcgatcaggctcaagtggccttcgccgagcaagtcgccggtctggccgtcggtatcggcgcccaggtaggcgtcgacactggcctgggtgggtgctgcgatcaggccttgcagggtgggcagcatctgttgcggcagggaaaactcgacggcaatcgggtcgatctgggtcacggaaaacaggccctgggtatcggctgtgcgcaggaagttgccttcatccacggtgcgaatacccacgcggccgctgaccggtgagcgaatctgggtgtaggaaagttgcacttgcgccgaatcgatggcggcctggttgccctgggcggtggccttgagctggttgaccagggcttgctgctggtcataggtctgcttggacacgccgtcgtcgacgctcaatgccttgtagcgcttgaggttgaccagcgccacctgcaactgcgcctggctttcgcccagttgcgccctggcctggtcgaggctggcgcggatcgagcggtcatcgatggtcgccagcaggtcgccggccttgacccgttggccttccttgaccagcaatttagtgaggatgccgtccacttgcggacgaatcaccacactgtgcagtgacagcaccgaaccgatcccgctgacaaaacgcggaacatcctgctgcgccacgctcaccacccgcaccggaatcgccgtgggcgccgccagtttggctttggctggacgggtcaaggcccaggctgcaacggccaacactacgaggacacccacgatcagggcggttttgcgttgaatgtgcatggggtgaggcgccagggcaaaggattggaagtgtgtgaggcctttatagcctgccaacccggtcagcaaggtgactgctaactgacggcgctgtcagtaaaggcagaccattcgtacaggtggtggttaaagatccgaggcgggcaggtatactgcgcgccagcgtggcccgcaagccggccccgcgtcatttcttgcacgctccggagcttccatgacttccccgacacaaacccctgttgaagcggccgacctcgtcgatccggccagcgccgaaggcgttgaaaaagccgagatcccggcgttcaaattccccttcaagccgggtgagctggccggggccaagaatgccgcccagccctggtacaagaacggcgccaagaacggtcacaccaagaccccaggcatggcgccaccgggtactcgccgttccatgggtaaacgttaagattaacccgctgtaatatttgcgggatgttgcctacaacgccagtcgctatttcgtcttgtaggcccgcgaccgtttcttgaaagcttgcacagcttccgctgcccccctggtttttccacagggcgcagcggagggcgctctttccggaaaaggacgtttcctgtggccctgatacacctctgtgtagcgtttgccctgttgctggcggtggatgccgttgcaggccttgatcaaccgcgacgcgaaatccgcttcgccgttgccgcgcaatttccgcccttccagagccgcaacccgcaagggcagttggtcggcttgaatatcgagttgggcaacgccctttgccagcagttgaatgtgcgctgtacttgggtcgaccaggtgctggtcgaagacttcgaacgtcttgaagcgcggcaattcgatgcaatcatgggtattgcccctacaccactacgccggcgctgggtcagtttcaccgacaacctctaccccttcaccacacgcctggtcgcacgtcgaacctcgggcctgatgccgctaccaaggtcgctcaagggcaagcgagtgggcgtattgctgggcagtaatcgagaagcctttgttcgttcgcaatgggcgcgcaaaggcgtgattatcaagagtttctggctcaacgacgaactggtccgcagcctggtggcaggcgatatcgatgcgaccctgcagggcactgtggaaattcgcgaggccctgctcgacacggctgccggccaggacttcgacttcctgggccccgccgtttgtgctgagctgttgggcaatggtgttgcgattgcgctgcgcaataccgacacggcgctgcgtgtcgagcttaaccgtgcgcttgagcagctcaagcacaatggcgagtaccagcggatcgtcgcgccttatcggctggacgtgccgtgatggctaattaattgcgcagaacatgagctggatcagtatttgccccctcggtgcgcttagagtcgacgccctgccgactcccctaacaatcacgagcgcgcttctccatgaagatcaatctgccggtcaccggtcggaatgtggactttgcccccgacgccaacatcctttcgaccaccgacctgaccagcgcgattacctacgccaaccaggacttcatcgacatcagcggctacagccgcgacgagttgctgggggcgccgcacaacatcctgcggcatccggacatgccagccgaggcgttcgcccatatgtggcaaaccctcaagagcggccggtcgtggatgggcatggtgaaaaaccgctgcaaaaacggtgaccactattgggtcagcgcgtatgccacaccggtgacccgagagggcgcgaccgtggagtatcaatcggtgcgtaccaagccggatgcgcacaggatcgcagtggcggagcggatgtatgcgcgcttgcgagcgggtaagcggctgtcctggccggtcgtcggcatgggggtgaaattgtcggcatgggtcatcgccacttgcgcggtgacctgggccttgggcttgagcctgacgggctacgcgctggtctggcagttactggcgttggtggcggggtgtgcggtgggggcggctggcgtgcggctgatgttgcggcccttggctgaactgcaacggcgggcgcgctgggtggccgacaacccactgagccaggcgatctacaccgggcgcggtgatgagtgtgggcagatcgagttcgccctgcacatgctcgaagcccaagcgggcgcggtggtcgggcgtattggtgatgccgcccagcgcctctccggccacgccgcacggttggtgcagcaccttgacagcagtcacgccagcagcctgggccagcagacccagaccgaccaggtggcggcagccattcaccagatggccgccagcgtggccgaaatggccaaccatgcccagcaggcgtccagggcggccgagcaggccggcagcgaaacccgtgaaggccacctgcgtgtggatgaaagtcgtgatgcggtgttgcgcttgtcccaggagctggcgcgggccacgcaggtgatccaccagttggaaaaccacagcggtgaaatcagcagcgtgctggaagtgatccgtacgattgccgagcagaccaacctgctggccctgaacgcggctatcgaagcggcgcgggccggtgagcaagggcgcgggtttgcggtggtggccgatgaagtgcgtggcctggcccagcgcacccagcaatcgaccgacgaaatccagcgcatgatcagtaccctgcaaggcggcgcacgggacgcggtgcaggcgatggcccacagtggcgagcatgtccaagccagtgtcaaacaagcccagcaggccgccgccgcactggatggcatcagccagcgcgtcatgcaaatcaccgccatgagccagcagattgcaaccgccgtggaagagcagagcacggtgagcgaggacatcaatcgcaacatcgtcggcatccgtgatgccggcgaggccaccgtcagtgccgggcagcagagccggctcagttcaagcgacgtggccggactggcggaggatctgcgccagctggcgcgtgagttctggtctaggccgcgcgcaacgagataaacgcgtagttggccggcacctcggtggcaatctgcgccccggcatccagcacttgctcggcgatgtccatccccgagacatggaacacccactcgttggccacggacggctgacccatcgccaactcgattgcttgggcaaacgcgcccatgtccggcaggtaagcggtaaacccatcccccttgagtgctgtggtgcgaatgccgagcaaggcgcacaccgcttccttggtctgcacatcatcacggtcggcctggcgtgagcgctggatcaactgcgtcagttccgggtccatcaactggccgcccacgatcagctccggcccctgctcccaggactccggcgggcaatccttggcggcggggttcaatgggatatgcgggttgatctccatcgggtagatgcggcacaccagcgggcggcgctcatagatacggcagcggttgtcctcgtcaagattccggcaggggccggcgttgtaggcggcaaaggtgattgccacaaacgcctcggtgttgccgctgggcacgaccaccgaacggcgttcggcatgttcgcgttgttgtgggggcaggcccaggccattgcccaggaaaccttccaccaggacgatgacgctgccgccgtcggccgcccactggcgggcttcttcgagggtcagggggacgtgatgatcggagcagcatttgccgcaacctacgcaggaaaattgagtgttcatggcagatctgtcaccaggctaggtcagagggcacgcaagaacggtgacgggtttttacctctgttcaccgttttgtctctctggaagcaagttacacgccagtgcctgtcagtcctctgtcactacgtcgcgtaggacaaatctcatgcctgcgctctcatacagctgccgagcgcgcaggttgctttccaataccttgaggtccacatagggctcgccgcgttgcttgaaggtatggaagctgtgcagcaacaacgcgcggcccaagccctggccttgggcgcaagggtgaacggagaggtgcttgatgaacgcgctggtccagcattgcgcgacggcgagaataccgtcgtggttgctcgccaccaggcaaagcgtggggtcgaactcggcgtcggtggtgaattgttgttgccaggtttccaggtgggggacgcggccgccgccctggtcctgggtcatgcgcaacaccgcatgaatcgcgggtgcaagctcgtcacggtaatgatccaactgtgtacccgccggccacagcggggcgggcaggctgccggtgaggtcgcggcgcagcagttggaagtattcgctcacaggcctttttgcgccacgctttgagcggccaccaccaggcacttggtcaactcgggagaagagaactttgtgagcaccgcgtcggcgccggccagccgggctttttcgctgttcatcgcgctgtccagggaggtgtgcagcaagatatacaggtgctggaaatcaggggtttcgcgcagggtgcgggtgagggcgtagccgtccatttccgacatctcgatgtccgacaccaccacattgatctgctccgccgtgccttgcagctccagcagcacatcgatggcttccttggcgctgcgcgcggtgtggcaagtgaggccgaggttgcgcagggtgtgtaccgattgctgcagcgcgacctggctgtcgtccaccaccaggatgcgcgcattgcccagcacttcggcttcttccatggtcaggtcggtgggcgcggcttcaatcggcgccggggcgatgccgtggatgactttttcgatatccagcacctgcaccaggccgccttccacctgggtcaccccggtgataaacgcacggttaccgccggagccgtagggcggtgggcggatgtcggtggtcaggcaatgcacgatcttgctcaccgcttgcacatgcaggccctgcttggagcggctcacatcggtaacgatcaggcagccgccgtccgggtctgccaggggcatttcgccgagggcgcggctcaggtcgatcaccgccagcgaatttccgcgcagggtggcgatgcctttcacatgcgggtgggactccggcagcttggtcagcggcgggcatgggatgatttcgctgactttcagcaggttgatcgccatcagcttgccgctgcgcaaggtaaagagcagaagcgagagtgagtctgcgcgggctttggtggtggacataaaaaccttctgtggatcagggatgacgaacatctatggaaggttatcgacttgagtgagccaggctttaaccggatttcgtgccggacggaagtcgatgtgggagggggcccctcccacattaatgttcggtcagtgtttccagacttgcgggttcaccaggtcctgcgggcgctggcccagcagggcgctgcgcaagttgtccagggcgcggttggccatggcttcgcgggtttcatgggtggccgagccaatgtgcggcagggtcaccgcattgttcagttggaacagtggcgattcggccagtggctcctgttcatacacatccagcccggcgccacggatacgctggctttgcagggcttcgatcagcgccggttcgtctaccaccgggccgcgggaaatattgatcaggattgcgctggacttcatcagccccagctcgcgggtgctgatcaggtgccgggtcttctcactcaatggcaccaccaggcacacgaaatccgcctcggccagtagcgcgtccaggctgcgaaactgtgcgcccaactcctgctccagcgccggcttgcggctgttgccgctgtacaggatcggcatgttgaaacccaggcgtccacgccgagccacggccgcgccgatattgcccatgccgacgatgcccagggtcttgccgtgcacatcgcaaccgaacaacggcgcgccgacgctggctttccactggccggccttggtccaggcgtccagctcggccacccggcgagcgctgctcatcagcagagcgaaggccaggtcggcggtgctttcggtgagtacatccggggtgttggtgagcatgatcccgcgttcgttgaagtacgccacgtcgtagttgtcgtagcccaccgacacgctggacaccacctccagcttgcttgcgccctgcaactgctcgcggcccagcttgcggccaacgccgatcaggccgtgggcgtggggcagggcttcattgaattgagcattgatgtcgcccagcttggggttgggcgcgatcacttcgaaatcctgttgcaggcgttcgatcattgccggggtgacgcggctgaaggcgaggacagtctttttcattgcaggcgggctcatcgactacggaggaatgccaagcacgctaacattccttgccactgttgtcaggggacggcagacctaaagtgggcagagaaaaatgtgggagggggcttgcccccgatggcagtgtatcggccaacacatctggtgactgacgcaccgctatcgggggcaagccccctcccacatttaatctgtatcacctgggagagatcagttcgccaggcgagcaccgctgaggctgccactcaattcatacgccaccagttccgcctgatgcgccgccagaatctccggcaacgagccgcgcaggtattccacccaggtcttgattttcgcatccaggtactggcgcgaggggtagatggcgtacaggttcaattcctgggaacggtagttgggcatgacccgcaccagggtgccgttacgcaggccctcgatggccgcgtacaccggcagcaggccgacacccatgccgctggtgatcgcggttttcatcgcatccgccgagttcaccaggaacggcgaggtgttgatcgccacgctttcctggccttcggggccgttgaaggtccacttgtccagctgaatcaccgggctgaccaggcgcaggcaggcgtggttaagcaaatcctgtgggcgctgtgcgcaacctttggtcttgacgtaatccggcgaggcacaggcgatgctgtaggtgatgcccaggcgctgggacacgaagcccgagtccggcagttcgctggccagcacgatggacacgtcatagccttcgtcgagcaggtccggcacgcggttggccagggtcaggtcgaaggtcacgtccgggtgagtacggcgatagcgagcgatggcgtcgatgacgaaatgctggccgatgccggtcatggtgtgcactttcaactgcccggcgggacgggcgtgggcgtcactggcctcggcttcggcttcttcgacataggccaggatctgttcacagcgcagcaggtagcgtttacctgcctcggtcagtgcaatgcgccgggtggtgcggttgagcaagcgggtttgcagatgggcctcaaggttggagaccgcgcgcgacacattggcagtggtggtatccagttgcacggcggcggcggtgaagctgccggcctcggccacgcaactgaaggcgcgcatgttttgcaaagtgtccatggagtgttctcaggggagataacaaattgtgacagaaagttacgccgtccagtgatccctaccaacggattatcgcctgaacggtaacaaagattcacaggaataccagcttatcgtccttcatatcgccccctagaattgcgccacctaccccgcaccaccacctcaggaagtcgcttgccgtgccgcgtcgcatcagcagagagctgaagactctcagtgtttgggccttatcgttagcaatcagcggctgcatcggaaccggaggaatcgccccacaaggccagtccctgaacgccaataacctggccaccgacgacgccatccagagcgccgcacaagacgcccactggcccaccgcacactggtggcaagccttcggcgatccccaactgaaccgctgggtcgacctcgcgacccaacacagcccaagcatggccatggccgccgcgcgggtgcgtgaagcacgggccatggccggggttgccgagtcggccgagtcgttgcagatcaatagtgacaccaccctcaagcgccacaactggccgaaggatcagttctacgggccaggtgagctgagcggtgccaacacctgggacaataatgcgtccctgggcctgagctacgccctcgacctgtggggccgtgaaagcaatgccaccgagcgtgccgttgacctggcccacatgagcgccgccgaggcacgccaggcccagcttgaattgcagaacaacgtggtgcgcgcctatatccagctgtcgttgcagtacgccaaccgcgatatcgttgcggcgacgctggcgcaacagcagcagattctcgacctggccaacaaacgcctggacgcgggcatcggcacccacttcgatgtgagccaggccgaaaccccgttgccggaaacccatcgtcaactggatgccttggacgaagaaatcgccctgagccgtaaccagttggcggcgttggcgggtaaaggtccgggagacgctgcgcagttgcagcgcccgagcctgtccctcgccgcgcccttgaagttgccatcgagcctgcctgcgcaattgctcggccagcgcccggatgtggttgccagccgctggcaggtcgcagcccaggcccgtggcatcgacgtggcccacgccgggttctatcccaacgtggacctggtcggcagcctcggctacatggccaccggcggcggcatgctggagttcctggcgggcaagaaattcaactacaacgtcggtccggcgatcaccttgccgatcttcgacggagggcgcctgcgtgcgcaattgggtgaagccagcgccggttatgacatcgcggtcgccaggtacaaccagacgctggtcaacgcgctcaagggcatcagcgaccagttgatccgtcgcgagtccatggacaagcaagcgtccttcgccgcgcagtcggtggcctcggcgcagaaaacctacgacatcgcgatgatcgcctaccagcgcggcctcactgactacctcaatgtgctgaatgcgcagacgttgctgttccgccagcagcaggtgcagcaacaggtgcaggccgcccgcctgagcgcccacgcggaattggtcaccgccctgggcggtggcctcggtgccggcagcgacgtaccgcaagacgccaagaccctcccgagcaagaccccgacggcactggccgtatttgatcactgagtaggatttgatgactcccttgcctgcaccgctgcgctggctgcatgcccttgagtggcgccgtggttttttcgactgggcacgcagcgacggcgtgacctgggtgtatatcttcaaggtgctggccgccgcattcctcacgctgtggttggccatgcgcctggaattgccgcaaccgcgcacggcgatgatcactgtgtttatcgtgatgcaaccgcaaagcggccaggtatttgccaagagcttctatcgcttcctcggcaccctggcagggtcggcggtgatggtgctgttgatcgccttgtttgcgcagaacaccgagttgttcctcggcgcgctggcgatctgggtcggcatttgcaccgccggtgcgacgcgcaaccgtaactttcgggcctacggttttgtgctggccggctacacggcggcgatggtcggcctgccggccctggcgcatccggaaggggcctttatggcggcggtgtggcgggtgctggaaatctccctggggatcctgtgcgccacgctggtcagcgccgcgatcctgccgcaaacctccagcgccgcgatgcgcaacgccttgtaccagcgctttggcgtgttcgcgctgttcgtcaccgatggcctgcgcgggcgcagccaacgtgaagggttcgaggccagcaatgtacgtttcatcgccgaagccgtgggcctggaagggctgcgcagcgtcacagtgtttgaagacccgcacatgcggcggcgcaatggtcggctcagtcgcctcaacagcgagttcatgagcctcaccacgcgcttcaatgccttgcaccagttgcttgagcggctgcgcaccgatgccgccgaccacgttgtcgccgcgatcaaacccggcctgcaggacctggctgaagtgctcgatggtttctcgggtcgagcgctcaccagtcccgacgcggcgcgcctggtcaatcaactgagcgcctacaaggacggcttgcccacaaaagtgcgcagcctgcgcgcaacgttccaggaaggcgaccccaccgaagccgagcaactggatttccacaccgcctacgagctgctctaccgcttcgtcgacgacctgcacaactatgcgcaaacccacgcgtcgttggccgatcacagccatgcgcgtgagcagtgggacgaaacctttatcccgaagaccaactggctggcctgcgctgcgtcggggattcgcgcgtcgtttatcttgattgtgctcggcagctattgggtggccaccgcgtggcccagcggcgcgaccatgactttgattgccgccgccaccgtgggcctgtccgccgccacgccaaaccccaaacgcatggcgttccagatggcctgcggcaccttgatcggtgcgttggtgggctttgtcgaaatgttctttgtgttcccctggatcgacggcttcccgctgctgtgcgtgatgcttgcgccggtgatcatcttcggcgcgtttctcgcctcgcgcccgcagtacgcgggtgtcggcgtgggcctgttgatctttttcagtaccggctcggtgccggacaacctcacgatctacaacccctacacctttatcaacgactacatcgccatgatcatcggcatgctggtgtgcgcggcggccggtgcgatcatcctgccgcccaacagccgctggttgtggcgccgcctggagcaggacctgcgtgaacaggtggtgtatgcgatcagcggcaagctcaagggcctggcttcgagcttcgaaagccgcacccgcgacctgctgcaccaggcctacggcctcgccgtcggccagccgcaagtgcaacgcgacctgctgcgctggatgttcgtggtgctggaagtcggccacgcgatcatcgagttgcgcaaggagcaggcgatcctgccggtgcacccggcgtacgccgagtcccagccgtggcgccaggcgatccgcgtgatgggccgctcgctggtgcggctgttcctgcaacccagcgcgagcaacctggagcgtggcctgattgccgtcgaccatgcgatcagccgcgtgcaggccaccgacgaacccttcgccccgcacttcgacacctcggccctgcgccgggtgaaaagctacctgcactttatccgcacctcgttgctcgacccgcaatcgccactcgctgcctttaaaggagctgcgcatgccccgtgaaatcgccttccacggcatctatatgccgaccatgaccctgatgtttctgatcgcggcggggctggcctggggtgtggaccgcttcctggccgggttcgacctgtaccgttttttctggcacccggcgttgctgcgcctgagcctgttcgtctgcctgttcggcgccctggcgctgaccgtctaccgttgagaatgccccgatgaaaaagtttttcagcctgctcgcgaccttgctggtactggccctggcgatctggattggccgcacgctgtgggtgcattacatggaaactccatggacccgcgacggccgtgtgcgcgccgacatcatcaacgttgccgccgacgtcaccggcgaagtggtcgacgtgccggtgcgtgacaatcagttggtgaagaagggtgacctgctgatgcagatcgaccccgagcactaccgcattgccgtcaagcaggcgcaatccctggtcgcgtcgcgcaaagccacctgggaaatgcgcaaggtcaacgcccatcgccgggcggacctggatgcgctggtgatttcgaaggaaaaccgtgacgacgccagtaacatcgccgactcagcattggccgattaccagcacgcgcaggcgcaacttgaggccgctgagctgaatctgaaacgtacccaagtgctggcggcggtggatggctacgtcaccaacctcaatgtgcaccgtggtgactacgcacgtattggcgaagccaagatggccgtggtggatatgaattcgttctgggtctatggcttcttcgaggaaaccaaattgccccaggtgaaagtcggcgacaaagccgatatgcagttgatgagcggcgagacgttaaagggccatgtagaaagcatctcgcgcggcatctacgaccgcgacaaccccgagagccgcgagctgattgccgatgtgaacccgaccttcaactgggtacgcctggcccagcgggtgccggtgcggattcatatcgatgaagtgccgcagggggtgttgttggcggcggggattacttgcacggtgatcgtcgataaggcccgttagccgagaaacccgcgaatcacaccgacgccttctggagtgatcccgagggtgtttgccgccacaatgattctttggtcgcctcgctcggtcaacagtacaggatccgtcaccacgggggactgcatgtcggtatagccctttctgtcgaagatcaggtccagggtgccatttgctttgaagcgggccacatagatccaaccaccccgagaagcggtcacgatgttcccggcgttggtggacatcacgcactgccagccattgtcacgtttgttatcgaattgactccgtagaagctgaccattgttgaatagaagatgtggcgcgccgccgggcgtaatggcccgcaggaggccctgcgtggttcccgcgccgatcactccaacctggcccgcagccacgatgctgttgtctgcgcgttctacaagggcattgaaggtcgtgtgctcgccgctgatgccaacggtgtgatagccaggtgtttgagggagaccaaaggtagtgtcgagtgtaccgtcatggttgagccgtgcgacaaaggcggtatcggtagcagggtcaaaacgggcatgaccgacaataacaattttatggcggttgccctggctgatacaggcgttgaccgcagtagccgcgttggcgacgggcaatttgaagtccagccttccattgccgttgaggctggggtccagctgcccatttggctgcaagcggaacaccgtcccgttcgtcatcgtcggcgctgcacgctgtgcgtagttggcagtgaccaggatgctcccgtcgtgttgcaggtatacggttgccgagtcttcagtcagcccttcactttggtgggtcagcaggatgcacacacccgcgttggcaaactgagggtcgagtgtgccttggctgtcgaaacgagcgatgaccaagtctgcccatggcgtgtcttgatcgcgccatgtccaacccagcatcaggatttttccatcgggctgaactgccagccttgagcctccggcctgtgtcaggggcaagaacatgcctgacaccaagccattgttaccccatgagtcatccaggctgccatctgtcttcaggcaacccaacccgaatacgtagttgccattgtgaaagaggttggcgctgaacaggaccttgccgtccaaggtggtcgtcagccctttgaaatgatgggtgacgatgaagtcgggatgttttttgagtatccactccagcgcggccacaccattgttaccgaaattggggtctgggctaccgggttgttgcgaagaggcgcttgggaggttcattggcgtgtcgctccatctgctgtcagaaaggaccggcctcagtctgttggtgaatgaatgcctcgtctactgtcagatctgacaggtggccggggctattgcaggttgccaggtgtttgcgccaacaacgtctcatgcaggtggcgccacaaaagcacaccactggcctgcttctcgaacaccacggttgcgcggcgatccgtctgcgtgccgctggcgtccacttgatgctcgcggtaagtcaccgttgccccacgggcatgccggtcgatcccggccatctcgctcaaggtgatcttcaacccagggcgcatgccgcctaaacgcgtgaacagtgcattgaccccggctgcattcacccttgcgccggtagcgggggcgatcatgctgaacgccggcgagaagcgggcgagcaacgtctgcaaggtgccttcgggtgcgacaccggcaaaccattgctcgatctcgacgtgggtctggatcacttcttcaaaaaaatcgctgtagtcgatcatttacaaactcccattcaaaccaaaacgtttcttcaacaccttctccaacaaccccttgggcaacaacgccgccagcagcggcaacgcgcggctgccgttacccgaacgcagcaggcgcggcggttgcgactgttgcacggccttgagcacatccgcggcaaactcattggcgggtgtcggcttgtcctgggacgcctggctgcgtgcgcggatgccgtcgcgcaatggccaccaaggggattgctcgttgatcaacagttcggcctggacaccggcgttttttgcgaagcttgtattgatcgcacccggctgcacttccatgacccgcacgccaaacggcgcgagttccatgcgcagggcatcgctcaaggcatgtacggctgcttttgatgcgcagtaggcaccggcaaatggcgtgaccaatacgccggaaacactgccaatgttcaccaccaggcctttgttgcggcgcaggggcgggaacagcgcctgggtcacaccgacgatagaaaatacattggtctcgaactggcgttgcatggcctcggtgccgccatcgagcaacgggcccatggcgccatatccggcgttgttgaccagcacatccagatcgcccagctgttcggccaggtgttgcagggcggtgctgtcgttgacgtccagctcgaccgcattgaagcccgcagcggcaagggcggcgacatcttccgggcggcgggcgctggcccacacgctgtagccggcggctttgaacgcgtcagccagggcacggccaataccactggaacagccggtgatgagtacgttgggcatgggtcagtcctttgtcagtccgagaaactgccttgcaggtgctcggcacgaaattccagggtttgcgggcgatagccggggcgcaacggcggcgtgggcaggcagtcttcccaggtcgccccggcctgcaactccccagggccgcgatagcggggggcggcgtagacgttgtcggccaggttgaccgagtcgcccggtgcataggcggcgacgcgccagcgcagttcggtcagcggtacatcgttgccgttgttgagggtcaacttgagcgggcggtcggccgggcactcttgcggggcgtagctgatgcgcagttccaggcgtgccagttgcgaggcttcgcggttgtccagccataccacccagattgctacgaagcccaggcccacggcggcggcgagggagacgggcaaggccttggcggggtagcgcagcagcaggatcagccaggtgatgatcaggagaacgccgaagaacatggagaccacctcgaatagggaacgagcatcctaacttaagcgtaggtgggattggcgaccttgagtgctgtggtgactgtgagagcctcatcgggggcaagccccctcccacccttgatctgtgaacacattcaactgtgggagggggcttgcccccgatgaggcccttgcagttaccccaaaagcccaaacaaaaagcccccacccaacccactgcggataggggacgcaatgggctgggcgagggcttcttgtacgactgttttactgcgcgatagttttcaccgacacgccacgttcaaccggtgtggagcgaccgtagatatcttcgaagcgctcgatatcgtcttcgcccaggtagctgcccgattgcacttcgatgatctccaacgggatcttgcccgggttgcgcaggcggtgcaccgaggcgatcgggatgtaggtggactggttctcggtgagcaggaacacgttctcgtcacaggtcacttcggcagtgccgctgaccacgatccagtgttcggcgcggtggtggtgcatctgcagcgacaggcatgcgcccggcttgaccgagatgtgcttgacctggaagcgcccgcccatgtccaccgagtcgtaggagccccacggacgatagacttcgcagtggttctgggtttcgctgcggccctggtcgttgagggtgctgaccatctgcttgacgccctggaccttgtccttgtgggcaatcatcatcgcgtccttggtttccaccaccacgatgttgtccaggccgatcaccgataccagtttgccgttgccgtggatcatgcagttgcggctgtcctggatcaccacgtcgcctttgctgacgttgccgtggacgtctttatcgttgaccgcccacagcgaggcccagcagcccacgtcgctccaaccggcactgagtggcaccacgcaggcgcgctgggttttttccatcacggcgtagtcgatggagttgtccgggcagcaggcgaaggtggcttcgtcgaaggacacggtatcggcatcctgttcgctgcgttccagggtcagcaggcaggtatcgtagatgtccgggtcgtgctttttcagctcttcgaggaagcggctggcgcggaacaggaacatgccgctgttccagaagtaaccgccgcttttgacgaactcgatggcgcgtttttcattgggtttttccacgaactgctcgacgcggctcacgccttccggcagcagcgaatcgttggtggacttgatgtagccataaccggtttccggacgggtggccggcacgccaaacagcaccatctcgccacgctcggcagccacggtggccagggccagggcgcgctgcagggctttctggtcgtcgatcacgtggtcggcgggcagcaccagcatcagctcgtcacggccttcgttgaccagcatcatcgcggtgagggccacggccggcgcggtgttgcggccgaacggctccatcaggatgcgttggctttccaacttacgggcggccagttgttcgttgacgataaaacggtggtccttgttgcagaccacgatcggggtgtccatgccttcgaacaccaggcgctccagggtttgctggaacagcgtgtgctcaccggtcagggccaggaattgtttagggaactgtttacgggaaagcggccaaagacgtgagccgctaccaccggaaaggatgactggaatcatgggggtttctccttgaatcgatttgggtcagagctacgaaggtttgtcgtttcactcttgtttttgtctcggtccgggttggtctcaaccaacccggaaaaatgctttagcgggtcgacactgggcgtttcacccagactggcgacaagctcgaaccggaacctgtgacgtacagcacggctgcctcaccacgttccagggccactggcttcacatcgccgactttcttgtcaccgtcatacagcgccaggctcaccttcaccgggttgatctcacgctcgccacggcccttggctgccaccgacttgaccacatcggtcttgccatcggcggttttcagggtcagggccttgtcgctgaggttctgcacgcgcaccagggacttctgcttgttcttgaacggcggttcttcgatcagctgtggctggccgctgccgctgttgaccagggtgtagtagtggtctggagcgagcttgaccggtacggtctggctgccgaccttggcgctgtagtcaccgccgggcatgaagctgaagtcgctgctggccagtggggccacgtcgctcaggttggtggcgccaacggtagcgctgacttcctggttgctggcgttgtagatgcgcacgaagctcgagccttttggcgcggtagggccgtacagggcggcgtcgccaccggcgaaggcggacatcgatacgaagctcaaaccggctgcaatggccagggttttagcgagacgacgcggagttgtagtgaaagtcatgtgagttacctctctttcagttttgcgcccggtcgggcgtctcggatttttgagtgttcaaagccatgttctgttggcgcgaaccggcttgtttaagctgcgcaacccacgcggggtcggcatcaccgatttcgttgttcacgggcagataacgttcaggaaactcccagatcagcacctggggcgggctgttcttgaagtcatcgcttttcaggtagctgagcatcggcaggatcgggccatggccgtcttcggcgtagctgaccacgtcgctgcccagggcttgcttgagggcaccgacgaagttccagttggggttggcgctgtagctggtgcccaccagcgccaccggggtttcgctgtcgctgaacagcgcgtcgtcacctttggtttcggccaggtgcgtgacacgtttttgcagcggctcttgcggtggcatcaggttttcgaacagcgggtccagcggcaggaacagacgcaggtcgcctttgtgcggtgtggtgctctcggcctcggtgacaaaacgctggggctcgccgctcagtggggtcttggcggcaatggtcttggctagttgcttggcggcgatttcagcgccgtccggggtccagtgggtgtcggtgcgcaggaacacctgcttgccgccgagcttggcctgttgcagcgggccgagcaggtccggggcgatgatcttgtcggcggcgacacgggcgtggaagtcctggtaaaggttggcgtggatgctggccggtttcacttcacccaggtgttccggatacaggcgcaccttggccggcacgattgccatcaccagttggatgccttgggccttgagcttctggcgcacgccttcgaccagcgcgtagttaccttccaggttctggtcttcgttgacggcggggttgaactcctcgtcgctgtacaaccagtgatcgcggcccaacaccacaccagggcggccttcattgaacagcttgtagtccagcgccgcccacaggttggtgcccaggcgcttgatcgggaactggtcgtcgtagtgagtctcgaccgccttggtccagcgaccgttgagcacggtggcgtcggcattggtgctgaagccgaagaagctgcgcagcgaccaggcgcccagggcgagcaacaccaccaggaacaggccgatatagaggacgcgtaatgaacgggtcatggtcggctccctcagaattggaagtaaaggaacggcgagaaactctgcgccgacagtttgagaatcgacgccacgaacagcagcagcaccgcagcgcgcatggcgtagcgtggccagtcagcggtccagtaggccggttgcacagcggcatcctggcccacggtgaagccgggctggtggatgctgccggggttgtcgcccggtacggccttgatcaggctcgggtcggccggcttggtcttctcggcagggcgattggtgtagaagtcgcgcaggccaaagaacgccagggttgcgtaggccaccaccagggttgccacttgcaggccggtgaggttggcgcggttgagttccgacagcgaccactcgccaaagctgaacatcgcaccgtacatacggccggcgacgtgcaggttttcggcgcggaagatcacccagcccatcaccaccagcaggaaggtgaaggcccagcgcaccgggttgaagctgcgcggcgaagtgttgaggccgatggctttttcaatcgccagccacatgccatgccacgcgccccacacgatgtaggtgatgttcgcaccgtgccacaggccaccgagcagcatggtcaggaacaggttgcggtaggtggtcagcgtgcctttacggttgccgcccagggtgatgtacaagtagtcacgcagccaggtggacaggctgatgtgccagcgccgccagaactcggtgatcgactggctgatatacggctgcttgaagttttccatgaagcggaaacccatcatcaagcccaggccgatagccatgtcgctgtagccggagaagtcgaagtacagctgcgcggtgtaggccagtgcgccgagccaggcatcaccggtggtggggttctgcagggcgaagcagtggtcggcgacgactgccagggtgtcggcaatgaacaccttcttgatgaaaccctgcatgaaccgcgtgcagccctcggaaaatttgtcgagggtgtgggtgcggttgttgaactggtcggccaggtcgcgaaagcgcagcaccgggccggcaatcaggtgcgggaagatcgccacgaacgccgcaaagtcgatcaggttgcgggtcgccggggtatcgccacggtacacgtcgatgatgtagctgatcgactcgaagatgtagaacgagatcccgatcggcaacagcacgtgggtcaggatgaacggctcaaggcccgccgacttcatcatcacgttgatgctgtcgacgccgaagttggcgtacttgaagtagccgaggatgcacaggtcgaccgccacgccgagcagcagccagcgctgggccggcttggtgcgtacgccggcggcaccgaccttgaggccgatccagtagttccacagcgtcacggcggcgaacagcgccaggaagtccactcgccaccaggcgtagaacacgtagctggcaatcagcagcagcaggttgcgatagcgttgcccgctcaaatagtacaagccgagaaagatcggcaagaacagaaacaggaacacattggacgagaaaaccatcccgatctctccatgtttaaccaacagtcaagggccagagcccccccaaacccccccacgaaaaatcgggggcgggccgtacaacattccaactgacgaaaccgactcgaactgtgggagggggcttgcccccgatggcggtgtaacagtcgccatctgtgttgaatgacaccctgctatcgggggcaagccccctcccacatttttctaccgtgttttgtcaggaacccttgttgcctttctcatgcgtcgggtcgtagaccttggtcaggtcgcccccgaggcggaaggtcttgaacggttgcatcccatgcttgcgctcgatcacgtccggcgcgcaggtgtagagggtgcagaagggttcgagccaggcgaatttcatgtcctgcttcaagtccttcatgtcctgttccttgccgttcttctgttcaaagacctcgggatccttgaccccggcgagcactttgtcgcccaggcgcttgagcgcgctgttgttttcctggcgcaggtccacgccattgaccagggcaaaactggcgatcatcgacagcggcggcagggcgtagttgtggtacgacagggcgcgttgctgacgcttcaattcgttgggcaggaacccttggtcgtcgacctggttcacgccgaccttgtattccttcaccgcccaatcaaacaggtcgcgacggttggtggcgacggacgttgccatcaccgaccaggcggcccagtaggagtggttgttggttttttccagcggcaggttgtcccagtcgctgaccacttgatcggcaagcttgttgaaccaggcttcgatcagttgcgattcctgctggtgattggccaacgggtgcgagtcggagaacttcaggcgcacataggccgaggccatgctgcccagcgcccatttgcgcatggatttgccggtgtggttgaagtccttggacatcaacgcatcggccttggcccacgacaccagccagttcagagtgcattcgagctgctcgggacggccgtcacgcatgaactgcatcacgcgcttgctggtgtctttttccagcttggtgatgtcggcagtgctgtcacggaaggctttttccgactgcacgttcagggtggaccgggctttgtccgagccttcgtacttgctgcgaaactgcagcggcccggtgtacggcgccggcatggtgtcgcagttttccttgaagtcgccggtcttgaacgcttcaatcggtgcgaaatagccttgtggcggacgcagcggtgcggcggcgttgacggagcctgcgaacatcgccaggcccagtaacgtagggatcagtaacttctgcataggtaacctcattgcccgagggaggcggttttttggccgccgcttgggaatacgttgcgtgtgcaaattttcgcttcgaccttctgcgcagcagcgcccgcttcgggaccctgcacttccacggccagcaggttctgcgaggcccagtcttcatcggtacgcagttcaaaggcgaaacgcccgtctgtatcggatgtttcgggtttctcgatcttgatgtcctcgtggcgcccgttcatgtaccagagggtggcttgcagggttttcaccgacggatcggcgaagcggatatcaacctggtgattggcattacgcaggtctttgttcgaactgttcaccagcaattcgttcttgccgggtttcaacgtggtgctcgcggtcatctgcgcggtcttgccttcgcagccgttgtcgagcagggccatcatctggcggtagatggtctcctggtccaggcgatacagcggcgagaactcccagatgaggattttcggcgggctcttctggaattcatcgctgcccagatactgaatcatcgaaccttccagaccaccgccggggaaggcgacgttgaggatgtcggcgccgatttcctgttccaggaagccggcaaagttgtagttcttgccgctgtggctggtgcccaccagggtgatctgcgggttgcccgaatcgccgaacaggtcgccgtcgcccgcttcgcccttgggctcggtggtgaactggtccatgtactggatcgcgtagctggtgccgcacagttgcccggccatgttgtgcagggtgccggtcttgcccatgcgcccggagcgcttggtttcgaattcgcgcttgggaatgtccgcgaactcgggcatcgcacgcactttggcaccgacgatttttgcggtgcgctgggcgccgtacggggtccagtgctggtcgccacggaagtagaagtcgtgggcgggcagttcatccggcagttgctcgttggtcaacggcgacaggtctggtaccacgtagcccatcttggcgaagcggccgagcatggtcttgtagttacccagggccttgtcgaagtcgaacttggctttctcttccgggttgagtttgttgcggttcaccaggccacgggtcggctggtagaccaccaccagttccacgcccttggccttgaacgcgtcgtgcagctgttgcatgcgcttgtagccggacggggtggtgtcgaattcggtgcgcaggtcttcctgggtccggaacaaccagtcgccctgggcttgcaccagggtggtgaagttctgctgatagcgcgtggtgtagttgcgcgcatcatgggcggccgggcacaggctgcagcacggttcggcggtgaaggttggcgccttgacttcatcggcgcgtacgccctggctggccgcgagcaggccgagggtcagacccgagaggctcagcagtttgatcatgtgtgggtgcataagggtcatcctcagtcctgcatttcggtctggcgttcgacagggtcgatcagcacggctttctgctggcgcaccagcaggtcgagaatctcttcctggcgatcgccaagcacgccggagaagctgatgccgctggatttggtcggcgccagcatcgacacgcggtacagctcgatgctcaacggcgagtcgatggacagcggcccgctgccgttacccgccagttcaccgccgaccacgatcagcgagaccttggcgtcgaacgggtcgagggcgatgtcgcggtcggtgtcggtcaaatccttgatgtggccgtacacaccggtcaggccgttggccatcgcggtgttctcatacagcttgatgttcacgctgttgcgcacgcggatgccgtggcggcggttgctgatcaccttgttaccccacagcaggttatcgccgctctcatagagggtgatgccgtcggtgtggttgcggtagatctcgttgtcggcgatcaggttgttcacgctgttacggtcgatcaccaggcccgagagcttgttgtcgtagctgcggttgttgaagatgaagctgtcgttcacctcacgggaaatgatgatgccgtgcttcttcttggtgccgtagacggtgttgtccgcgatgatcaggccgtgggaacggtcgtgggggtcaatgccgtagacgatgttgtctttgtaggtattacccttgatcacaaagcccgtggtctcgtagcagtagaagccgtaccacatgtccgagaactcggaatcgatgatccagccggtcggctccggacgcttgagcaccttggccatgttcggcgtgtactgggaaatactcaccccgtacgacttactgttggcgtagccaaaactggccatcttggtgttggagatataggtctcggtgccgccccaggccagcaggaacgggcggaattccttgggcgacttgaacagcgccgggccgttggccttttcgctccagccggtaaccttagtgtcacgcacaaacagctggccgtcgttgatcaggaacgaaccgccttcctgggacaggcgcagctcctgggtcttcttgtcgatttccaggatgcccttgcgcccgaccacgatcggcaacttggccacgatcactcccggcgaggtctcgctcaggtactgcttgggcaccttgcccagcaggtccttgaggttcatgtagccgtcgtcgacaaagatcgcctggggaataccgtgctgacgcaccacccattcggccatcttgttgtcaccgccgatgaaatccttgagcgcatcttcctgcatcatgcggcggatgctgattttgcctggcttggtccttacgatctttttttccattgccgcggcggtgtagcccgacaggtccggcagggccggcttggccatttccagcggcgcggtcggcgggctggagatggtgtaggtcttggcctgctgcagttccttggcgatggtcggcgccttggccgccgtatcggcaaacgctgtggcactggccaacagcattgccgctacgagtaggctttgagcattcattgggcgggctcccatcagaatttccagatcacgtcgacaaacgcgcgatgcatgtacgagtcgacgttgctgccataggcatcgcccggtttgaatacgccggcacggaaacgcaccagcgccgatggctcatcaatcgactggctgagcgccgccggcaacaggccggtcttgaagtatttggtgaccaccaggtccatttcctgacccaggtctttcttgccatcttcaagcggcagggaagtactggacaggatcgcgccggtgacgtcgtcggtgttgttctgcactgcatcgataccgttgctgcccaccggcttgttgccgtcgacacgccagaacttgtggtacaccaggctggcgtcgtagtcctcgcgcagctgccaggaaccgaacaggctcatggcctgcatgttgttcatctcaccacggaaggcctcaccgaagcggtgcacacgggactgggtgccggtccagttcgaacggttgctttgcaggccgttctgctcgtactcggcgctggcgcgggagtaggccgcgccgacttgccactgcgggtcaaggcgcaggcggatacccaggtcagtggcccagccattcacgttatcgctgcgcttggcctggtcggggcggctgccgtcggctttcaacgcgttgacggtgtcgcggtcgccctgcatgccggtgatgctggcccaataattgacggtgttggtattgcgccagttgtaggcgtcgctgttggcttcgataccgagccaggtcaggtcgccgttttcgcgcttgtccaacgagtcggtgggtacgcccggttccgggtagtcgagcttgccgttgtcatgggtgtggtgaccgcgcaggccgatccactggccgggcgtccactggtaggcggcgtcggcgtagaggtgctgacggtccttgtccttgggcgacagctccttgaggtcggtacggtactcgctgaaacgttcggcgacgccgacattggccttgagcagggtggtgtcgaaggtccagttcagcgcttcgatgttggtgtcgcgccattggccgtcgtcattgcgcaggcgttggcgacccagcttgaggatctcgccggggtagggcgtgaagccgctgtagccgacccagaactcgcgcatggccaggtagtttttcttggccttgcggtcgttgttggtggtctgctggttcgcgtcatcggccgactgttgcagcgggtcggtctcgatgatgtcgctggacaccaccgcctggcccatggcgtaggcgctccacgcgccgctttcaccgtagatccacgggcgcaggtcgaggccgacgccgttgacgtcgccgcctttctgcgtgccgaggtcgcggtcatcttcggactgtgcggtggctttgacttccaggccgaagttcttggcttcggtcagcgcggccagggtcgggcacgaccacagcagggcgaaggtcaggccgatgccggccttgacgaatgggttgagcttcatagggattcctcgccgtcgtcttcttcatccagggcgtgcagttgcaacgtgctctgggccagggtgccgcgggcggccagttcctgttgcaccaggcgttggccctgggcgcgttgctccggcgtcaagggcgcttcgagctgggtcgccaggtcattggcttccggggtgtcctgggctttggccagctggctgaagacataggcgttcaatgggtcgggcttggtgcccttgccttgggaaaacaactgggcgatggcgaagtcggcgctgttctggccgttgcgcgcagcagtcagcaagtggtcgagggctttttgcgggtagaccttgcccaggtagccacggcgatagatctggccgaggtagtaatcggcggccacttccttgcccacggctttttcgaaatgcgcttcggcggccttggcatccgccggcacccacttgccttcgtagtagagcttgcccagcaacagctcggcgcgcggctggtcggcggcgcggccgttgtccaggtacttcatcatctggtcgacgtcgccgagttcggggaagtcgtagagcagttgcgccaggctgacccatgaagccgggtagccgggggcgattttttccagcagggcctgggcggttttttcgtccggctggccgagggtggcgtcacccagcacgcgcgccacgctatcaacacgttgtgcggtgacggtgccacggctgtagccggcttccatctgcttgagcagctcggcctgtttttccggctcggcttttttctggtagaccgtggccagttcgacgtagcagatgtcggtggtgttcagcgcggccttgcagatgcgctccacgtcatccagatgctggtcgtaggtgtcctgggtgcgatacagcagcacctgggccaggccggcttccgggtaaccggcggcctgccattggctgatctgctgctgggcattcacattcgggaagctgtgcgggtattgcaggtacagcatcgccagcgggatcagggtattgccttcgccattggcaaaggcttttttcagcaggccttcggcttcatggtgttcggcctcggtgctgccgggcttggccaccagcaggcgaccaaggcgcgcctgggcgcggggcgaggtatccgccgccgcacggtaggtggcttcggcctgtttgatttgcgccggatcgcgggtgcctacctggatgtcggccaggcccacctgggcctcgctgtagcccaggtctgccagttgctggtaattctgctgcgcggtgacggtgtcgccacgcttgagcgcttcattggccaggcgttggtcgggcaggccggcgcaaccggcgagggcgatggccagcgccaggggcaccggcaggtttcgaagggcgctcatgattaaagacccgcagccatggctttatcgatcagccagttcagcgatgggccacggtcgctggtgacttccaccgggcgcccggcgtaggtgctgtccagcggtgcgtccggcttgatctgcacgcggatgtcggaggacaggtcggcgctgttcaggctggtgctgctgacgatggtgccggtgcggatctgctcttcgtcggccacctggaagctcaccggtgtaccggggcgcacatcggcgaactggcgataggtgaagcgcgcctccacgttggcctggctaccgcgtgggaccagttggaagatcacgtcgcccttgctggcgtactgaccgtcagccaccagttgctgcgccaccacgcaatcgcacggcgacgtcagggtgccggtcatttgcttgccgaacagctcttcaaccttggccggttgcagttggtcttcgtccaggtggcccttgagcacgtcgagcatgctggtgctgaaggtcgccagtggcgcgcctttggcggcgaccgcatcacccttgagcaggctctgcacggtgccgtcgcgtggcatagttacgttcatgccgggcacgctgaccaggccggcctgggcatggctgacgaagtacatgccgtacaccgacttgaaaacgaaaccgaaagccgccaggccgacgatgaagatacccgcgctgaacaccacggcgcgcaggcggccggcggcgctcatgttgctgccgctgtccttgaccttgcgtgccttggtgaagttgtcgcgttgcagggtcgccagcacgtcgcccatggtcacgatgtcgccggacaggtgcgaggtgatcaggtggcgcagggtggaaatatcctgggcgtcgaggttctggaactggcaaccggtgcggccggtctggcggtcgtaggagcggatctgcagttccacgtccatggccaggccgaggttatcgatgacaaattgcaggcggcccttgtgcacctcgccgacggtcaacggctgggtggcggtgaacgccaggccgccggcggacaggtcgatcacccgtgcttcggtctgggtgcggtcggtgttgaagaagcgcagcttggccgggattttcacgcgggcatgttggcgctgggcttcggattcgtggacaacgttggcgtttactgggctgttcatagttcggtttcctagttaattcaggcttggcagggtcagaccatcatcagcaacacggcaacgaagatgctgccggcggagaaggtcatggtccgagacgaccaggtgttgaaccaacgttgaaagctggccaaatcgcgggtcagtttggtgtcctggcgggtccaggactgttgatcgaggcggaagaacacgtagatcttcaccagcgcgcccatgatctggttgtaatagagaatcaccgggtacgcggggccgatcttgtggccggagcacgacagcagcagggtgagaatcaggcgagtgatgccgatccacagcaggtacgcgaggatgaaggcgccgccgtatttgaaggtggcgatgatcgccacggtcaggccgagcagggacgtccacatcgacacgcgctggtcgaacagcacgatgctggtgaacaggcccagccgacgcacacccaggcccagggctcgggagttctggcgcaggttgttgccgtaccagcggaacatcagcttgcggctggccttgatgaagctcttttccggcgggtgttccacggtgttgatcgcggcgtccggcacgtagaaggtgtcgtagcccaggcgcatcaggctgaaccagctggacttgtcgtcgccggtgaggaacttgaagcggcccaggcgccagtgctgcagcgagtcgctttccacgtcggcgataaagcccgggtcggtgaccacgctggcacggaacactgacatgcggccggtcatggtcagcacgcgcttggacagggccatggagcacatgttgatgtgacgctgggcgaaacgcagcttgtgccactcgctcatgatgtagccgccgcgcacttcgcagaactcgttggtggtcaggccgccgacgttgccgaacagttggaaccacggcacggtcttgcgaaccacgccttcggcgagcacggtgtcgccatcgatcacggcaaccacggcacggtcgtccggcaggtggcgggagatggcgcggaaaccgaaagccaggccgtcgcgtttgccggtgccggcgatgcgcacgaagtcgagcttcacgtgttccggtggattcatgcgttcccacaggctcttcaccagcagctcatcggacatttccaccagcgagcagaccacggtggtggggaagccacattcgatggcttcacggatcaccgagctgtagacctgcgcagtggtcagcgcgtcgatacggaaactggtgaccatcaggaacacatgggacgggtcggcagccttgcccagcttgcgcactttgcggcgcaggtgcgggtagaccacatacaggaacaacatgccgcgaaagaaatgcgtagcacccatcgagtagcgccagatgccgacggcgccaatcaggaaaataaaattcttcgactcggagtcgaacgtactcgccggcaagagcagggcgagtcccatcagcaggctcaaaaagaacagccagccggcggattggagcagtacgtgttttaacttggacataagcgtcatccgaaggtgaagaaggctcccggctgcaagcgctggggatgggaacgcttgcagcccggaacttgccgttgctgttaccagcaaatgccttcggtacggcctgtggcacaggtggccttggacatgaagcccaccaggtcgatcacttgcttgccgtgtggtgcgttctgcgccagggcacggaacttctcatcgcggttgcccaggatgatcacgtcggagttgttgatcacttcgtcgaagtccgagttgagcagggacgacacgtgcgggatcttgccttcgatgtagtccttgttcgcaccgtggacacgggcgtactcaacgttgctgtcgtagatgctcaggtcaaagcccttgccgatcagcatttcggccagttcgaccagcgggctttcgcgcaggtcatcggtgccggccttgaagctcaggcccagcagggcgactttgcgtttgtcgtggctggagacgatgtcgaaggcgttctgtacctgggactcgttgctgcgcatcagcgagttgagcagcggcgcttccacgtccagggaaccggcgcggtaggtgagggcacgcacgtctttgggcaggcacgaaccaccgaaggcgaagcctgggcgcatgtagtactgggacaggttgagggtcttgtcctggcagaccacgtccatcacttcgcgaccgtcgacgccgacggccttggcgatgttgccgatttcgttggcgaaggtcactttggtggcgtgccacacgttgcaggtgtacttgatcatttcggcaacggcgatgtccttgcggatgatcggtgcgtcgagttcttcgtacagcgactgcaggacatcgccggaggctttgtcgaactcgccgatgacggtcatcggtggcaggtcgtagtcggcgatggcggtggattcacgcaggaactccgggttgaccgcgacaccgaagtcgacgccggcttttttgccggagcagtcttcgaggatcgggatcaccacgttggccacagtgcccggcagtacagtgctgcgcacgaccacggtgtggcgggtggttttgtcacgcaggacaaaaccgatttcgcggcacacggcctcgatgtagtccagttccaggtcgccgtttttcttgctcggcgtgccgacgcagatcatcgacaggtcagtatcacggatggcgtcggcgaagttggtggtgccacgcagccggccggtttcgataccctggctcaacaactcgcccagaccgggctcaacgatgggcgatttgcctgcattgatcaggtcaatcttgtccttggagatgtctacgccgaccacatcgtggccacgggcagacaggcaaccggcacagactgcgccaacgtaacctaaaccaaatatgctgatgcgcatcgcatttacctctttgtcttcaagaccgtattaatcatgccaataattggccggagttcatgtttgcaagcgtcactgatgccacggaagttgggcgaatagacgcctacttaccgcgtacaggcatgttaattagtgagtgactaactattgcactcaagttgtgcgcaacttggccttgttattggggcttgccctgaaatgcagccggcctttctggggaaaggtgccgacgccagtgccgcaagaccctgatagaggcttttagcctttatttatcaacgtcttgggtgtcatcactgacacatttgggtaagcgctgccttggcctataggggatagcaattgatccttatcgccgccctcaactcatatcagttgatgatatgacccgtgagtcaaagttgatgaggtaactttgctacttccttgggtcgtcatgtaagtcatctcttacagaaacagagaatttcgttaccggtggtatgagccgtgggtttaggcgaagttccgggccgctcatcctgtttcctgaaatttcttgaaatattaggaaagatggcactggtagtatattgatagcacttgctatttgggccagtagttatagggagttggcgcgcggggatagttttgtgccactagtgtttgaaaaaagtggtgccactacgaaaaaaatcgacgaatgtcgagtgaaagaattgttagagatgcgtcgggatattttttgacgtcaaaaaaatgacgattcgcgaattaaaatgcggttaaaaatgtgggaggggacttgcccccgaagacggtgggtcagctaaagataagctggctgatcgatcgtcatcgggggcaagccccctcccacatttgttcatcagtgttctcgggagctttattctggtgcgtgatcgcgcaaaaacaccaggttatccggcttggactgctcggcgttgaagcgatagccctgcacatcaaactgcttgagcttcgccgggtcgttgatgcgttcctcgatcacaaagcggctcatcatcccccgggcttttttggcgtagaagctgatgatcttgtactggccgttcttcaggtccttgaactcggtgttgatgatccgcgccttcaaggccgtacgcttgaccgccgagaagtattcgttggaggccaggtttagcagcacgtcgtcgccttgttcggccagcgcttggttgagccactcactgatacgcgtgccccagaaggcgtacaggtccttgccacgggcattgggcagcttggtgcccatttccaggcggtacggcatcatcaggtccagggggcgcagcaggccatacaggcccgagagcatgcgcaggtggtcctgggcgtagctgaagtcggcatcgctgaaggtctctgcattcaggccggtgtacacgtcgcccttgaacgccagcaacgcctgcttggcgttttcctgtgtgaacgcaggcgtccagctgccgaagcgggcggcgttgaggccgccgattttgtcggacacgtgcatcagttcgctgatttgcgccgggctcaactcgcgcagttgctcgatcagctcttgagagtggtcaaggtattgcggttgggtgtagcgcggggttaccggctttgactcgaaatcgagggtcttggcgggggaaatcaccatcagcatgaagtcgtctcctgtaaacgtggggggattctaggggttggggcgttttgactccacctatgatggcgataggcgcgatccgctatgatggccggtgactctggagagggagaccctgtgtgcgaatagcgcttttgttgtcggcatgcctgctatgcctgaatgcccaggccgcgccggtggatgtggtcagcctggaccgtggcacctggcccgaaaaactcggcagcccggcgctgttcgatgtggcttcacgcgccgaaatcctgatgttcgcccacagcctgctggccagcgagaaccaggacgaaaccgcgctcaagcaacgcctgggcctgaagatcatcaacctggccgccatcgacgacctgcgccgccaactctggcagcgcctgctggagaactacaccttcgcccagcagagctgtgaggaagacgcgtcgttctgctatctggtggaaaacatggatgacctgcgcgagcaggcgggcaagttcgaggtcggcgaaaactctttctatataggctgggccggtccgagccatattttccatgagcgctacctggatgaactgctgcgcaaggcggcgctgtttccgcagatcagcagcgaaatcgcgcgtttcggcgaccatgagcgcaatggcgacgagttcaacgatcgcctgttcctgctgacgttcgatggcggcccggcccccgtcagcggcaataccgactggctcgccgactacctgcgcaagcaaaagatgaacgcgaccttcttcgccctcggcagcagcctgcaaacccgggtcgagcgcagctcggttgccgatgtgcaggcgctgtaccagggccagtgtgttggcacccagggttggcagtaccgttcccacagccattgggtggactggcagagttcgatcacccgcagcgcgtcgttggcgcagaacctgatgccggaaaactacgtgccgctgttccgtccgccctatggccagcgccgcgcggacagccagggtttctttcaagcccagggcttgcaggtagcgttgtgggatatcgactcccaggacgaaccgggcaagctcaaggccgatgagtcggcgcaacgggtgctgaccttgatgctgttgtggcgcaaaggcgtgattgtgttccacgacacccaggacaaggcacgggtcgctttgcccatgctgttgcaggcgacggcgcagagtggtctgggttggcaggactgccgggaggcgtttcgctgaagtgcccggaactgttgggttttgggcgatttcggggtgattttgtgcgatatttcgatgcaggcggacttccgactttagcggggtatgtggcactcggctagtgctattcgtcatcctgaaaaataaacttcaaaaaagcgtcaaagtgctttttcctgtcacacgttttgcggtattacgaagtcagatcgccgaaacctgcaacacaggtggcgtcttccaagactcctcatgtgggcactgcgcttgacgtcactcaggtgcagtcggtggtcgaatcgaggcgcagcaccgcccaggtattgcgtcgactggctcccacaaaggtgaccgagtatggatgatcatggacgtaacccttcttccgaccagccaatcctttatgtgcttgataccaacgtattgatccacgatccaaacgcactgctcaacttcgaagaacaccacgtcgccatcccgatgatcgtgcttgaggagctcgacaaactcaaaagcggacaccacagcgtggccgccgaatgccgccaggccatccgcctgatcgacaagacattgggcgaagcctcgccggaagatgttgaagtcggcgtgccgatccagcgcggcaaaagcggacccaagggcttgctgtcgattctgatgagcaagcgcagcgagcccaacagcctgctgccggagaacctgaacgacaacaagatcatcaaccaattgatcgacctgcacgcccgcgacaaggacctgcgcgtggtgctggtgaccaaagacatcaatatgcgcctcaaggcccgagcgtgtgggatcgcggccgaggactacagtaccgaccaactggtcgacgacgtgtcgatgctgtcccgtggttatcacatgatgactggctcgttctgggaccgcgtcagcaaggtcgaaacccgtcaggaccatggccgtacctggcaccaggtgcagctgatcgataacctgccggccgtacatatcaatgagttcatcgtcgacgaacagggcttcgtgggctggatcaaagagatccaggtcgacaagctgctgatcctcgacctgcatcaggaacccctgttgcaccaggaagcctggggcctgaaaccgcgtgatatctaccagagcctggcgctgtacgcgctgctcgacccggacatccacctggtcaacctgaccggcgccgcaggctcggggaaaaccatcctcgccctggctgccgccatcgagcagaccatggtgaccaagcgctatcgtcgtatcatcgccacccgcagcgtgcagggcctggaccaggagatcggtttcctgcccggtaccgaagcggaaaaaatggagccgtggctgggggcgatcaccgacaacctcgaagccttgcacatggatgatgaaaacacccatggcagcgtcgactatatcctcagcaaagtgccgttgcagttcaaatccctcaactacatccgaggtcgcagcttccagcagagcctgatcctgatcgatgaatgccagaacctcacgccgcaccagatgaaaaccatcatcacccgtgccggcgccggttccaaagtggtgtgcctgggcaacctggcacagatcgacaccccttacctgtccgcgaccagctccgggctgacgtacctgactgaacgcttcaaagacttcccgaacggcgtgcacattgcgctgcagggtgttccacgttcgatcctggccgaatacgccgaatcccatctctgaccgtcagcacctactaaaacgggcgccccatgggacgcccgttttttgtgttcaggccgaccgctcgaccagcgcccaatcgatcgccggtttgtgtgccctggacagcagggtgtacaccgacggcaggacaaacaaggtaaacagcgtgcccaccagcatgccgatcacgatcaccagccccaacccaaagcggctgctggcaccggcacccgacgagaacagcatcggcaccaggcccaccaccatggccgccgtggtcatcaggatcggccgcagccgaatgcgtgccgcccgcatgatcgcctgggccggcgtgcagcggtacagcacctgcagctcgttggcgaactcgaccatcaggatcccgtgcttgctgatcagaccgatcagggtgacgaggccgatctgcgtgtagatattgatggtcgccagccccagcgccaggggaatcaacgcgccgcagatcgacagcggcaccgtgatcagaatgatcagcgggtcggtcaggctttcatactgcgcggccagcaccatgtagatcacgatcagcgcaaacaggaaggtcagcatcagcgcattgccctcgtggatgaactgccgcgaatcggcctgccagtcatggctgaaactggcgggtaactggcggctctgttcctgcaagaaagccactgcctggccgaggctgacgccgggtgccggaataccctggaaggtcgcgctgttctgctggttgaactgcttgagcttgttcggctcgatcacgttgtgcagcctcaccacggtggacagcggcacctgctggccggtgtcggtgtcgacgtagaagccattcaggtcctggggcgtgaggcgccgcgaggcctggctctgggggatcacatcgtaggagcggccttgcagggcgaaccggttggtgtagttctcaccgatcaacaccgccagggtactgccgatgtcctgcatgcgaatccccaggctgttggccttgctgcggtcgatgcgcacttgggtcaccgggttattgaacgccaggtcactgtcgaccaccgcaaacagcccgctggcccgcgcctgggttttcagcgcctccatggcctggtacagcgaacggtagtcttctgtactgcgcatcaccatttgcaccggcaaaccaccggtggaggcgggcagtggcggcaactgaaacacgaagatcgagttgccttccacggcgtcgacactttgttgcagctcggcctggatcgtcgcggcgctgcgctggcgctgcgaccattcggtgaagttcaccccggcaaaactggcggcgacgccgtcattgccgttgatgatccaggtgctcacggtctccggcaagtggccgagaatcccgctcaactgataggcgtagcgctctacataatccaggttggcgtgctgtggtgacttgatcgccagcagcaggttgccctggtcttcgttgggcgccaactccttgctcgcattgccatacagccagggcaggctgagcagcaccaaggcgccgaacaacaggatcagcccgcgcttgcgcagcgaacccagcaatgcgcgctgatacaggcgtgccaggcggtggaagaagcgctcggccaggcggctcatggtgccttcgtgctcctggccaggtagcagtttggcgcacatgaccggggtcagggtcagggcgattaccccggagaccagcacggcgccggccagggtcagggcgaactccttgaacagcgcgcctgtcaggccgttcatcaggccgatgggcatgtacaccgccgccagggtgatggtcatggcgatcaccggcgaagcgatctcgcgcgcgccgaacaaggcagcctgcagcgcgctgcggccttccttgacatgccggtggatgttctccatcaccacaatggcgtcatccaccaccaggccgatcgccaacaccatcgcgagcaacgtcagcaggttgatgctgaagccgaataacgtcatcaaacccagggcgccgagcatcgacaacggaatgctgacgatggggatgattacgctgcgcaccgagcccaggcacaggtagatgatcaccaccacgatcaggatggcctcgatcagcgtttcgatcacttcgataatcgaggcttcgataaagtgcgcggtctcgaacgccagggccaccttgacccctggcggcagggttttctcgatgttcggcaacaggcgcttgatgtcggcgacgatcaacagcgggttgcccttgggggtcgcatagaggcccaagtgcaccgcgggcttggcgtccatcagcgcactggtttcataggccgccgaacccagttcgacggtcgcgatatcgcgcaggcgcagcaggtggtcgccgttgttgcggatgaccatgttgcgaaactcatcgaggctgctcaggtcggtgttgacctgaatcgaggagatcacatagtggcctttgatctgccccggcgctgcctggaagttgttgttgcggatcgcctgttccacctgggcggcactgatgccgtggcctgccatgcgttgcgggtcgagccacaggcgcatggccaggcgctggccgccgaaggtctcgaccttggccacgccgtcgatcgtggaaaacaacggctgcaccacgcggctcaggtaatcgctcaaggccgaggccgacagcgaatcactggaaaaccccacgtacgccaccgctgtcgcatcgccggcggaacgttcgatcaccggatcataggcctgttcaggcaggcggtatttgacctggttgaccttggcaatcacatcgctcaacgccttggccgagtcctggttgagtgccatgcgcagggtgatctggctgcggccctgcaccgatgaggaactgacatagtccacgccttccaccgaggccagggactggttgatcggttgggttacgaagccttgcatcagctcggcgggggcgccggggtagtcggtggtcacgctgatcaccgagctttccaacagcgggtattggcgcacaggcaggtcgaggtaggccttgagcccggccagtacgatcagcaggctgaccaccagggccagtaccgggcgacgtacgaacaggtcggtgaatttcacgggttttctccggccatggtcatccccgaggacgggtcggcatcgttcaacaccgtacgttcgaggggctcgatagcggcaccgtcactgagcttgatctgcccggaaatcaccacgcggtcacccggattcaggcccgcatcgatcaccacgcggccattgcgccgctcgctggtcttgaccaatacgcggcggacgacgggtggggtattggcatcggtcgatggctgcaccacgaagacatcttcgccgtaggcgttataggtgatggcggtttccggcacgctcaaggtgttgccgggcaatgactgtggcaggcgcactttggcgaacatgcgcggcaaggcgccgtcggtgggggcctgcagtagcgcctggacactcagggtgcgtgagcggtcgaggaacgggtcgatactgctgatgcgtgcgctgaagctttgcctcggcagggcgtcgagttgtacatccagggtattgccgaccttcagttgtgccagggcttgctccggcacgctgaagtttacgtacaggcccttgtcgccgaccaggttgatcaggctgtcgccggggttcacaaattggcccaggtgaaccttgcgaatcccgagggtgccagcgaacggtgcacgaatggtcaattggtcgatctgcgccttgagctcctgcagggcgccttgagcggtggtgtattcggtctgggcattgtcgaaggcttcgcgagacgtggcgttcaccttgaccagggtgcgcgagcgttccagcttgaccttggcattttccaactcaccctgcaggcgcatcaggttgccgcgttggggcgcatcgttgagcctgaccagcacttggtcgcgctcgacgcgctgcccggattccactggcaactgcaccacacgcccgccgacttcagccggtacgctcacctgctgcacggcttccagctcaccgatggcttccagatagcgggtgaacggtgcgtcgctgaccggcgccaccgccactttgatcggcgcgggcgcgtaggcagcggcagccggatggctccagcgccacaatgcccacgccaatgcaataaggatgaccacggcaatcgacaacgccacggtggttcgtgagacggcacgtccggatcgactgacgtgtgacataagcttcattccttgatggcaatcagtagatgggccagcagcccggcgtcagtagttcgacgaggttctcatccggatcgcggaaatagatgctcgatccacccttgggccagtgggtgcgcccctcaatggcaatatctgcgttgtccaggcgcgcctcccaggtcggcaggtcgtcggcgtcgatggcaaagcagatatgaatgcgcccgttggcgtcatggggcgggatctcgccgccgctcaagtatttggtttgaagagaggcgccccgtttgaagagcaagagggtattctgctggccgacgtttaacgcgacgagtacgttgctctcgaccatcgtctcaagctccaggtgctgggcgtaaaacgctttggcgcggtcgaggtcgtctacgtacagcgcggtctcaatgattcgtttgagttgaggcatggttttgctccttgttgaaggttgctccctgagatggaattcacagcatggtcacggtcctactgcgcaatatcgatttgaatctgttggtggtgctcgatgcactgctgactgaaaaacacgtcacccgcaccggtgcacgactgcatttgagccagccggccatcagtcattccttgagtaaattgcgggtgctgctcgacgatccgatcctgatccgcgagggtaacgaagtggggctcagcgccctggcgcagaatatccaggtgccgttgcgcgacatcctcagccagatcgaaacactgttcggcaagtccatcgacttcgacgcggccagttcccaacgcacctttcaattggcgatgtcggactacggtgcggcgattatcctgcccaagttgctggtgcgactgcgcagcgaggcgccgaacaccacgctggtggtgacccagggcagccggcatgcgatgttcgagcaagtggcgcagggcaagatcgacctggccctgggggtgttccccagcctgacgcccgatgtgtcgatggaagtgttgttcgaggaaacgttttcctgcctgctcgaccggcggaccctgtccaaggacggcatgctcgatctggagagctacctggatcgtccgcatatccaggtgtccatggatggtggtgccaatggtgaagtagacagtctgttgcgtgccgaaggcttgcgccgtcgtatcgctgtcagcgtgccgcactggcgtacggcgccgagcctgttgcacaacaccgacctgatccttaccgtcgccacccgcacgctggaagacacgttgctcaacccggacctggtgcagttgccgccaccgttcagcattccgcgctttccctttgtgcagatctggcaccagcgattctgtgacgatccggcacatgcgtggttgcgcgaacaggtcaagcaagtggtggctcataccgtgcaggtcgactgatcggggcgcaggcgtaaccgcaagtcctggcccaactgggtcacttcgtacagggtgaagtccagggaatgggtgaggttttccagctccggtaaatgcaccagcggccgtgcgaggtcaccgagcaggcgcggcgcgacgtacagcaacagctcatccaccagcccggcgcgcagcaggttgccggccagggtcggcccggcttcgaccatcacatcatgcaaaccgcgcaggctcagatggaccatcaaggcatgcagatcgagaccactctggttgcccggcaggccgagcaagcgctcagtgttggcgcctggcggcagatgttgctcgtgcaccacatgcaggcttggcgcctggtcgtcgaacaccttcgcggtatcgggcacccgcgcctggctgtcgaggatcacccgcagcggcgcgatggcttcggcagacgccatctcacgtacggtcaatgaggggttgtcggccagcaccgtgccgctgccggtgaggatcgccgcactgcgcgctcgccaatactgcacatcggcccgcgccctggcgccggtgatccattgcgagcgcccgttgttcagcgcggtgcggccatccaggctcatgcccatcttcaactgcacccacggccgatgacgcttgaccgaggacaagaagccacggttcaactcgcgggcggccgcattgagcaagcccacgcgcacctcgatcccggcgtcgcgcagttcggcgatcccacgaccgtcgacctgctcgaatggatcttcgtgggcgacgaccacacatgccacgccagcctcgatcagcgccaggtgacaggcgccggtgcgcccgacatggctgcagggttccagcgtcacataggccgtggcgcccttggccagggcaccggcctggcgcagggcgaagacctcggcgtgcggaccgcccgcacgccgatgccagccttcgcccacgatgtgtgcaccgtgggcgatgacgcacccgacccgtggattgggccaggtggagtgactgccgcgctcggccaacgacaatgcatggtgcatatgttgaaagtcgatttcgctgaagtgggtcatgggcggcgttgccctgccacagcgtgggcggtgatcgggtagatacgcccgtcgtaggcgctggccaggaagccactgccttcggcgtcatgggtcaggcatgaaataccgctggcggtgatcttctccacctttgcccatttgcgcttggccaggtcgaacacggccacggtgccgccgtagctgccggtggcgatcatctggcggtccttggagatggcaatgcacttgatcgagtggctgtgaggggtgtcatacacctcgctgttgccggcttgccacaggcgcagcttgaggtcgcgaccgatactggcaaagccgccctggatctgcgtgcagccgttggaaatacggtcgtgggccttgtccaggtaggtttccagttcgaagtcgctgatccggaagaacgccgcggccgctgtcgcgcatacgctgaacaggtactgttcatcggcggcgatgcccttgatggcgttctcgtgcatgcgcacttcgcgcaggaaacgcggctgctggtgttccaggttgaagatcaaggcttcgccagtgtacgtacctattgcggcgtgcaacttgccatctttttcaaaggtggtgccgcagttgagcggtgagcggtgctggtagatgacgtcgccggtcttggcgtcgaacaccgtgcccatctggccgccggtcaacacgctgtcgccgaagggcagcaggaagttgcacaggctgccggccttggtgctgggctggccattgatctgcaggatgccggcatcaccgatgctgtagatgtcgtcgccgaccacggtgactgcgttcaaactgatggccggctcgatgccgcccacgtcccattcctgagtggtgaaatcccaggtggcgtaggttgagccgaaggtcacgaaggcgatgcgatggttgcccagcaatgcacagctgcgtggccagatgatgcttggcagtgaagtctgggcggtttttaccagttggttatcgggcgtcaactcccacagcatgacgcaacggtcgtagctgaggctgaccagcaggcgctgcgcgtcgttccatacgatgcgcttgatgcccgcggcatgggcagcttgcaggtaggtgccgctgctgctgatcacggagattttgccttcgtcgtcaccggcgaaaatgatgccctcacgggacagggccaccgtgtcggtttcgacgccgcccaggtcgatcaggtccagttgttcgccgctggcagcgtcccaacggcggatcgaaccgtcatcgctgctggacaccagggtcttgccatcggcggcccagcacaccgaaatcacgtcggcatcgtgaccgctgaggatccgcagggttcgcccgctgaggtcgaacaggcggatgctgtggtcccgcgagcaggtggcgatggtctggccatccggcgagaaggcggccatttcgatgtcgtcatcgtgacccaccagcacgcttttcaagcgcagcgagggaatttcccagacgcgggcggtgtagtcgctgctggcactgaccagcagggtgccgctggcgttgaacgcgcattggttggccaggtggtcgtggagcacacgctggatcggcgtcttggtttttgcatcccacaaaataacctggttgtcataaccggcggtcgcaacgtacgtatcgttgaatgttgcaataccactaatagggccaaagtgtctcatgcgtcatcatccttaatgtagtgtgggcggaagaaagtgtcaggcgcgcttcggttgtttcatcaggttgatcacgtgatttttcttatcgactttcgcttgcaggtaatgagtgttatgtcgagtgacaaacacacctgtcggaataacgttgtccactacaatgccgttatccaccagggcctgaactttgtccgggttattggtgatcaattggcactgtttgatgttcagcgcttttaacatgccagcggccatggaaaagtcgcggtcatcttcaggaaagttcagatgggtattggcttcgaacgtgtccatgccagaatcttgcaggcggtaggcgtccaactttgcatataagccgatgccgcggccttcttgccgcaggtagataagatagccacccacttcctgcatgcgcaggatcgactcgtttaattgcgggccgcagtcacagcgctgtgaactgaatacatcgccggtcaggcattcggagtgaatacgcaccaacgggctgatgggattggcggggccaagctttatcacgatatgttcgtgtgccgtgtccaacccactgaacgtgtagaaagttccagggttggaatggtcgtccagggggatatcaacatggttgcgtacgcttaggcggttcatggcggttccttccgtgcttgaatgttcaacgcgttattgttttggtacggggaggggttacagggtttgtgcgaggcgaaagcccattacgtaaatctgtcgcggatacttgccgtgacgccggcaattgcgggtcaggtcgcgaaaccgcgtgaagctgccaccacgggcgatgcggtgggtgccgaccacagtgacgaggtcgtcggtgatggcggtgccgccggggtagggggcgtagtcgtcagcgacgaattcttcgacattgccggccatgtccaggcagccaaatggcgacgcaccctcgaccagaaggccgaccggggtggtgtcgaacaggcccagttcagcggtgttggcacgctcgggcaggaaggtatccccccagggatattcgaggttttccgggccggcggcggcgtattcccattccgcctcagtgggcaggcggaagctgcggccactggcttcgctgagccaggcagcgtaggcgtcggcgtcttcggcagtgaccccgtagaccggatggttggcgcgttcgtgagggtactgtccgaaggcccagctttcgggaatccgtgcctgcgtgttggcttcgagaaaggctcggtattcgaggttggtcaccgggtatttaccgatggcgtagggccgcaggtgtacgcggtgacgagggacttccttggcgatccagtcccgatccaggcccaggccgcgcatgtcgtgcatcacttggtcgaccgccgattcggccaaaccgatctcgacggtgcctgcgctgatttgaatcatcgtagggttgagtacatcgagcctggggtcgttggtcagtgccagcagttgggcggcggcatagcgccaggccagcggcgagacagggttttcgacgcggttggccaactgttcgctggtctcttccgaaaccaggcgccaggctgccagcggcaacttgagattgacggcttcgtggaagtgctcaggcaggcccatcaagaaacggtctgtcatttcggcggtcagggggccgtcgaacacgggccaatggttgaaacccttggaagtcataacgctcgttttcctactgcgtgggagaaaaggcacgtacacccaggcgcacgtacccggccttcagagggtgcagatcagtccggtttgcaggcagttgcgttcgaagtcatcccagtagcccttggggtgcttggcccgctcggcctcggaaataatcggtttttgccactgcaggcgggagaagccggctttcatgattgccagctcatagcgctcgcggctccagcgatggaaggtgaaggcgctgggcggtgtggtgacgaattcggcgtggtgacggaagccgccttcgtggggttcttcggtgagtacgtgcacgccgtatttggtgaagttgccacgtttcaattgaaaggttggctctaccgtgtaagccacgacccgtccgccgggggcgaggttcttggcgacgacttggaacatcttgtcgagtttttctggcgaatcggcgtagttgaacagccaggcggcggtgatcaggtcgaatttgccgagaatgcccagatcgcagatatcgctgacgtggtactcgatcggctcctggttgcgcgccgactcttggcgggccaggtcaatcatggaggcggaaatatccacgccaaccactttgctggcaccttggcgatacagctcgcgtccgaaaaaaccgaagccgcaggccaggtccagtacggatttgcccttgggattaccgaccatgctgaagaaggtcgcggtttccaccgagcgctgcgaggcgctgtccgtgaaagcttcgaagcgttcgccgatggcgtcgtaagttgccgttgcagtttgagtggtcattgcctcacctttttaaagttaatagctgtcgtcaatccctgactgggagcatgaagagttcttctgttttcggtgaccctgttttgtctgaatcaagtgcgagtggtaataaggaaccctcctatgacgacaagtacgccgaccagtttgttaatgttgagagactgtttggggaaacccagcaggccgaaatagtcaatcgcaattgaaacgataagttgtccgatcaataccgccatgatgaagttgagggcgccgagtcgaggcgccatcaataacgctacggtaatataaaaaacgccggcaacaccgcccatccaaatccaccagggcccgtcttgcacggcggcaagattagggcgaggcgccttgactgcaataatgacaacaatgagtacaaccaggctgaccaatagggatactgcagtggcccataaaggatgacctagcagattacccagtttcgcgttggtgcctgcctgcaagggcactgcaaaaccggcgaataaactgagcaggatgaaatacagtaaggtcatgaagtaggcattccgttttttttcaagttttacggtgcttggattgttggcgccaattctttgttctgatggggagtattcgtcgcactgatcgggcatttggctactcgtgattcagcggcgggctacgggtgtaatcaggtgtgcgcaatcttgaccgacgggtttacaatcgctgctcctgatcaggagtatccctgtgctgactcatctcgattcccaaggtcgcgcccatatggtcgacgtcaccgacaagtccgtgacgttccgtgaggccgtggccgaagcgcgcgtgcgcatgctgcccgagaccctgaaaatgattgtcgacggcgcccaccccaagggcgacgtgtttgcggtggcccgcattgccgggatccaggcggcgaaaaaaaccagtgacctgattcccctctgccacccgttgatgttgacgggcgtcaaggtcgaactgagcgccgacggtgcagactcggtgcatatcgtggcgcgctgcaaactctccggccagaccggcgtggagatggaagccctcaccgccgccagcgtcgcggcgctgacgatctacgacatgtgcaaggcggtggaccgtggcatgaccatcgaaagcattcgtctgctggaaaaactcggcggcaaaagcgggcatttcaaggcggaccaggcatgagcatcaacgtattattttttgcacgttacgcagaagctgtgggctttgattcgctggagatggagggcgagttcgccaccgttgatgctgtgcgcctcgcgttggccagtgacccggagtttgcagtactcaacgagaccagcctgatgtgcgcgcgcaacgaagagttgtgtggtctcgatgagccggtgcaggcgggtgacgaagtggcgttcttcccccctgtgactggaggctgagcatggccattcgtgtacaggcccaggcctttgatccaggcagcgaggtgaatgccatgcacgcggccaacgttggcgtgggcgcggtggtgagtttcgtggggtatgtacgcgacttcaacgacggccgtgaggtgtcggggatgttccttgaacactactccggcatgaccgagaaggccctggccaagatcgccgtcgaggctgaacagcgctggccgttgctcaagctggaggtgttgcaccgcatcggcgcgctggagccgggtgagccgattgtgttcgtggcggcagccagtgcccatcgccaggcggcgtttgatgcctgtgcgtttgtgatggactacctgaagacgcgggcgccgttctggaagaaggagaacaccagtgaggggccgcgttgggtggaagggcgtcacagcgatcacgccgccgcagatcgctggaagtcttaggccaaacacagcaccaaatgtgggagggggcttgcccccgattgcagtgggtcagccaacagagatgttagatgtgccatagctatcgggggcaagccccctcccacagtttttactgcattccagcttacggacgcttgcgttccacggcgcgcaacaggtgcgtcggcggcgtctcgcaactgatcttgcgccctagcagcgcttcgatcgacggcaactgatacgagtcatcttccccggcaaagctgatcgacacacccgccgccccggcacggccggtacggccaatgcggtgcacgtagtcatccggcacttccggcagggtgaagttgatcacgtggctgatgccgtcgatgtgaatcccgcgtcccgccacgtcggtggccaccagcacacggatcttgccttcgcggaagccttccagggtcttgatacgcttgtgctgtggcacgtcgccggacagttgcgcggcgttcacaccatcacgcaccaggcgttcttcgatgcggcgcacctcgtccttgcggttggcgaacaccatcacgcgctcccagccgttgtcgttgaccaggttgtagagcagcttgtacttgtcggcgccagccaccgcgtagatgtgttgctcgacgttttcgctggcgacgttttccgcttcgatctcgacgatggacgggtcggtagtccactgcttggcgaggttcatcacgtcttcggtgaaggtcgcggagaacagcagggtctgacgctcggatttcggcggggtctggcgaatgatctggcgcacttgcgggataaagcccatgtcgagcatgcggtcggcttcgtccagcaccatcacttcgaccatgtccaggtgcacgtcgccgcgctggttgaagtccagcagacggccaggggtggccaccaggatgtcgcagtgacgagcttcgaggtgcttgagctgcttgtcgaagtccatgccgcccacgaacgtcatgacgttgaggccggtgtacttggtcaggtcggcggcgtccttggcgatctgtaccaccagctcccgggtcggggcgatgatcagcgcgcgcggttcacccatgtagcgctctttgggcggcggcgtctgcagcagttgggtgatgatcgagatcaggaacgcggcggtcttgccggtgccggtctgggcgcggccgatggcgtctttgccggccagggtgaagcccagcacctgcgcctggatcggcgtgcaatacgggaaccccaggtcctggatggcgtgcatcagttccggggccagcttgaaatcatggaaacgggtcttgccttcctggggctcgacgacgaagtcttcgagtttccacgcaatcaccggcggttttggcgcacgttcacggcgcggttttggtgccaccggtgcggcaacgggctcgactggcctggcctgttcggctggggtcaccgtcggcttcttcggctgggcggcaggtgcggtccggtcgggctgtctgccgtcattgcggctgccggctgtcggggcaggagcactggaatctggcgcgagcggctcagcctcgcttttgccgaacatcttcttgagtgctttgagcacggtgatctcattaattggttaaggaatgtacgccggccagtgtaatgcaagaatcgggcgcggcgtagtgcgtctgtcatacagctacataaacgctggttttcagcccaggcgagcggtcaaccaggcaccgatgtcgcgtatctcctcgggtaacacttcgtggcccattgggtattcctgccatgtcacggtgacaccacggctcttcagatgctcgtaggcgctgcggcccatggcgttctgcaccacatcgtcgtattggccgtgcaggcacagtgcgggaatgcgctgctggctggcggataattccagctcgtcgctgaacgtgggcgcgtaggtggagagggcaatcacgccgcccaaggggccttcccaattcaggaaggcggtgtggaacaccacggcgccaccttgggaaaaaccggcgaggaaaatccgcgaagcgtctattccggttctcttctgtgtctcgatcaggtccgtgaccatttttgccgacacttccagctcttccaggctgatggaacgggccgggctcatggccttgatgtcgtaccagcttggcatctcgtagccaccattgatcgtcaccgggcgggtcggcgcctggggcaaaacgaaacgcgtggtcagcaggctttcctgcagcgcctcggccaccggcaggaagtcgtagcgatcggcacccaggccatgcaaccagataacgcaggcgtctgcgggcttggcgggctgaagaatcaagggttcggtcatgtctgctccattaatgtgcgtgcgctccgattaagtgcgacggaacggtgcgcgatgggttgatctgttaagaagatgtcgcacggttgaatctttttctattgaccatgggctgaaacgactcagccatcactctggtacggggcttgctatgtgttgaacgatgtcagcgctatcccgggacggtaacactatcagtgactgccgcttatgggatagcaactggaattactgcgacaacttcatgccgcttgaccctaaaaaaagccaacacgggtcgatatcgcctcataagggtgcgctgaggttcgagctccgacacaacaagagcaaactggaggtttgaatgaaggtattgaaatccaccctggccatcgtgaccgcggcggctgtattgggtgtcagtggtttcgcccaagcgggtgccacgctggacgccgtgcagaagaaaggctttgtgcagtgtggcgtgagtgacggcctgccgggtttctcggtaccggatgccagcggcaagatcctcgggatcgatgctgacgtttgccgcgctgtggccgctgctgttttcggcgatgcgaccaaggtcaaattcagccagttgaatgccaaggagcgtttcaccgcgcttcaatccggcgaagtcgacattctgtcccgtaacaccaccatgaccagctcccgcgatgccggcatgggcctgaaattcccgggcttcatcacctactacgacggcatcggcttcctggtaaacaacaagctgggcgtgaaaagtgccaaggaactggacggtgcaaccatctgcatccaggccggtaccaccaccgagctgaacgtttccgactacttccgtggcaacggcctgaaatacaccccgatcaccttcgacacttccgacgaaagcgccaagtcgctggagtccgggcgttgcgacgtactgacctccgacaagtcccagctgtttgcccagcgcagcaagctggcctcgccgaaggactacgtggtgctgccggaaaccatttccaaggagccactgggcccggtcgtgcgtaatggcgacgacgagtggctggccatcgtgcgctgggttggctacgccatgctcaacgctgaagaagccggcatcacctccaaaaacgtcgaagctgaagccaagtccaccaagaacccggacgttgcgcgtctgctcggtgctgacggcgaatacggcaaagacctgaaagtgaagaaagactgggttgtacagatcgtcaagcaagtcggtaactacggtgaagtgttcgagcgcaacctgggcaagagcaccccgctggaaatcgaccgtggcctgaacgcgctgtggaacgccggcggcattcaatacgcaccacctgtgcgctgatcgctgatggttctgtcacccggtgggccaaccgccgggtgatgttctgttccattatttccggggcacttcatgcaaaatcaaatcggcgcacccaagcagaagctcagcttcagcgaccctaaagtgcgtgcgtggctcttccagatcatcacgatagtggcggtggtctcgctgggctggtacctcttcaacaatacccagaccaaccttcagcaccggggcattacctcgggtttcgactttcttgaacgcagtgccggcttcggcatcgcgcagcatttgatcgactacaccgaatcggacagctatgcccgagtcttcgtgatcggtttgctcaacactttgctggtcacttttatcggcgtgatcctggcgaccttgctggggttcatcatcggtgtagcgcggctgtcaccgaactggatgatcaacaagctggcgaccgtgtatgtggaagtgttccgcaacattccgccgctgctgcaaatcctgttctggtacttcgcggtgttcctgaccatgccggggccgcgtaacagccataacttcggcgacaccttctttgtcagcagccgtggcctgaacatgccggcagcgattgccgctgacgggttctggccgtttgtggtcagcatcgtcgtcgccatcgtggcaatcgtgctgatggcgcgttgggccaacaagcgttttgaagccaccggcgtaccgttccacaagttctgggcgggcctggcgctgttcatcgtgatcccggcgttgtgcgccttgatcttcggtgcaccactgcactgggaaatgcccaagttgcaaggcttcaactttgtcggcggctgggtactcatccccgaactgctggcactgaccctggcgctgaccgtctacaccgcggcttttatcgccgagatcgtgcggtcgggcatcaagtccgtcagccacggccagaccgaagccgcgcgctccctgggcctgcgccccgggccgacgctgcgcaaggtcatcatcccgcaggcgctgcgggtgatcatcccgccgctgaccagccaatacctgaacctggcgaaaaactcgtccctggccgccggtatcggttacccggaaatggtttcgctgtttgccggtacggtgctcaaccagaccggccaggccatcgaagtcattgccatcaccatgagcgtgtacctggcgatcagcatcagcatttccctgctgatgaactggtacaacaagcgcattgcgctgatcgagcggtgaggaaacgcccatgagtacgcatacgttcaaacctgatatgccgccgccgaacaaagtgttcgggccgatggcatggatgcgcgccaacctgttttccagctggctcaacaccctgctgaccctgttggcgttttacctgatctacctggtggtgccgccgatcctgcattgggcgatcctggatgccaactgggtcggcaccacgcgggccgattgcaccaaggagggcgcctgctgggtgtttatccaacagcgcttcgggcagttcatgtacggctactaccccggcgacctgcgctggcgcgtggacctgaccgtgtggctggccatcgttggcgtagcgccgctgttcatctcgcgtttccaacgcaaggcgatctacggcctgagctttttggtgctgtacccgatcatcgcctacttcctgttgcatggcggcatcttcggcctgaccaacgtggcgaccagccaatggggcgggctgatgctgaccctggtgatcgccaccgtcggcatcgccggtgccttgccgctgggcatcatgttggcgttggggcggcgctcgaacatgccggcgattcgggtggtctgcgtgaccttcatcgaattctggcgcggcgtgccgttgatcaccgtgctgttcatgtcctcggtgatgctgccgttgttcctgcccgaaggcatgggcatcgacaagctgctgcgggcgttgatcggcgtgatcctgttccagtcggcctacgtggccgaggtggtgcgcggtggcttgcaggcgattcccaaaggtcagtatgaagcggccgcagcgatgggcctgggttactggcgcagcatgggcctggtgattctgccgcaagccctgaagctggtgattcctggcatcgtcaacacgttcatcgcgctgttcaaggacaccagccttgtgatcatcatcggcctgttcgacctgctcaacagcgtcaagcaagccgccgctgacccgaaatggttgggcatggcgaccgaaggctacgtgtttgcggccctggtgttctggattttctgttttggtatgtcgcgctattccattcatttggaacacaagctcgacacaggccacaagcgttaggagttgttgttatgagcgaagcgatcaaacagcctgtgagccctgaaggcattatccagatgcagggcgtcaacaagtggtacggccagttccacgtgttgaaagacatcaacctcaacgtcaagcagggcgagcgtatcgtgctgtgcggcccgtctggttcgggcaagtccaccaccatccgatgcctcaatcgcctggaagagcaccagcagggccgcatcgtggtcgatggcgtggagctgaccaacgacctcaagcagatcgaagcgatccgccgcgaagtcggcatggtgttccagcatttcaacctgttcccgcacctgaccatcctgcaaaactgcacgctggcgccaatgtgggtgcgcaagatgcccaagcgcaaggccgaggaaatcgccatgcactacctggagcgcgtgcgcattccggagcaggcgcacaagtttccggggcaactgtccggcggccagcaacagcgcgtggcgattgcccgtgcgctgtgcatgaagcctaaaatcatgctgttcgacgagccgacttcggcactcgacccggagatggtgaaagaggtcctggacaccatgatcggcctggccgaagacggcatgaccatgttgtgcgtgacccacgaaatgggctttgcgcgcaccgtggccaaccgggtgatcttcatggacaagggcgagatcgtggaacaggcggcgccgaatgacttcttcgacaacccgcagaatgatcggaccaagctgttcctgagccagatcttgcattgatcgatgcttgaaacgataaacccggcctggcgccgggtttatttttggggctaggacgctttgagcgtttcagcgttatcgtgtttgatgtaggtgaacgcgccgcgcatgtctgcaccctcggccagggtttttgcgtcagccagcaaatgcgggtgacgatccagcaagcgcatcagtaataccaggggtttgggggcaagcagttcgccgcgttcgtagcgtgagaacgcgttgtggccgcctcccgacagcagttcgacggcctctttttgcgtaagatgcagcttgcgtcggatgcgttttatctcggcgccgatgatttgtcggaaggcaaggatcaattcttccttggctttgccgtagcggtctgcactgtcgttttctgggtcccagaatccgtcaccacacacctcacactcccagcctgaaagattgtcgatccgacgctccatatctttgactctgattgtttcgctgcggccctggtaataactcaatgcatcgggggccccgcagatgcagcacagctctttctttttcatgggttttctccttgaaggagatcaccggaggtctaccgtctgtgcggtaagtgcccttgatgtaaatctccctacctttcgagtgggtgtggtacacgtcctgccatactcgatggtctccataagtggtcatcgacttgtacagcatccagtttcgcaactcataaataacgtcctgcatttcctcgatgccaaatccaagacgctcgccacattcctctgctgtccgggtgaatgctttccttcccaaccgcctcacatccgcctttatcaccgccaaatcgtaatgaggtgtgtacttttccataagacacctgagttcataattaccctcagagggtaatttcaccaatcgaaaatactgctcctttacctgcctaagaaccgtagtgcgttgcctttgtaggcaagtccgaataggctgtaggaaaattcatcctatgattggacgaaagtgcgaaacccatgacagacatcgccccgctgatcaaacgctccctggtcgaccaggccctggagcagttgcgcctgcgcatcaccgaaggccggtgggccatcggtgagcgcctgcccaccgagcccgagctgtccgccgagctgggcatcagccgcaataccgtgcgcgaggccatgcgcgtattggcgttctccggcttgattgaaatccgccagggtgacggcagttacctgcgttcgatgaccgacccgctgggcgcgatgcgggcgttgtcccactgcaccctggagcaggcgcaggagacgcggcagattcttgaagtggaagccatcgggttggcggcaatgcgccgtaccgagcaagacctcatcaccttgcgcgaggccctcgataccagcgccgcgctgtatcacggcgaccttgaggcctatatcagcgctgacctggtgttccacaaacacctcgtggacgccgcgcacaacccggcactcagcgagctgtaccagtatttttcgcgcatcgttgccgcccagttgcgccagaccctgaacatttcaccgcgtcgccaagcggtgttcgacctgcataccgccttgctcgacgccgtggcacagcaaaacccggaacgcgccaaatccctctgccggcagttgatcaatgagccttgaagcccaacgtaaaaccgaattcgaagaactgttgatcgacgccgaagccgacgacgaggtggtgcagcacacgccaccgccggtgagccgcccatggctgttgctgctgggcctggtcctggtggcactgaacctgcgcccggcactgtcgagcatggcgccgttgcttgccgacgtctccgccagcctggggctgtcggcagccagggccggtttgctgaccacgttgccggtgttgtgcctgggcctgttcgcgccgaccgctccgctgctggcgcgccgtttcggtgccgaacgggtggtgctgggcatcctcctgaccctggccgcaggcatcatcctgcgcagttcattcggcgaagccgggttgttcgccggcagcctgattgccggggcgagcatcggcatcatcggcgtgctgctgccggggatcgtcaagcgtgatttcccgcggcaggcgggcaccatgaccggtgtctacaccatggccctgtgcctgggagcggcactggcagccggcgcgtcggtgcccctgagccacgccttcggtgacagctggagcatcggcctggggttctgggtcttgccggcattggtggcggcgctgttctggctgccacaagtggggcaaaagcacggtgcccaccaggtggcctatcgcgtgaagggcttgctgcgtgatcggctggcctggcaggtgacgttgtacatgggcctgcaatcgtccttggcctatatcgtgttcggctggttgccgtcgatcctcatcggccgtggcctgagcgccacgcaagccgggttggcgctctcgggttcgatcatcgtgcagttgctcagctcgctggcggcaccgtggctggcgacccggggcaaggatcaacggctggctatcgtggtggtgatgctgctgaccctcggcggcctgttcggttgcctgtacgcgccgctcgacggcctgtggggctgggcgatcctgctgggcctgggccagggcggtaccttcagcctggcgctgaccctgatcgtgttgcgctcgcgagactcccacgtggccgccaacctgtcgagcatggcccagggcattggctacaccctggcgtccatggggccgctggcggtcggcgtggtgcacgactggaccggcggctgggcggctgtgggctggatcttcgcagtgctgggcctgggtgccatcgtggccgggctgggtgcggggcgcgcgctgtacgtgggcgtgcgcagcgagaaggtctgagggttacaggtacctcacttcgatcgttaccgagccgtcgataggttgttcttcgatcaatgtcagcgtgttggccggggcgatggcggtgtcgatttgtacatcgctggtcaggtccttgactgccagcggcgcgggggcgcccgtgacgtcattgctgaaggctatgaggctgtcggggtgccacaaatagaagctgcccgggaacgtctgccacgaacttccgccgtcctctgacctgatcggcgtcaggtcccctccgtctgcggacgcgcccagaaagcgcagtgagatattccccagtttttcgccgccattgatcaggcccaggccccagtgtaggtcgagccagccggatccggggcggttatccacgcccttgagcgcaaacaccgtggcggcctcgcagttgatctgcagttgcataacggcgacaggcagttgggtggggatctctttattgaggtcgcgtgccgacaccttgccgtgatccaccacaccgccaccgctcaaggttggcgtgcaggcgctgggcgtgatcagccctttcacggtcaggtcgacgctgctggcagccagggtggtggcgccatagcccgtcaacagggtggcagtgagggcggtgataagtgttttcattttcagggtgttcccagggcagtcatcgggtcagggtgttgcggtcagaggtacaccacttccagcgtggcggaaccgtccatcggagtctcggtgctcaagtccaggttctgcttggcgttgatcaccgcctccagtttcagcgtgctggtcagcgtctggatcgccgaggggccggcggtgctgccttcgatattggtaaagcccaagaggcttcgggaaccgatatcgatcgggttgcgattggaggttcgccacgccaccccgccggtggtggactcggtgccgtagatcaccggcaagtcatcgaccacggtttgcttggggtcgaaactcaccgagtacacaccgatcttgttgccgctgctgtccaggcccagcccgtagtagatctcgctgttgacatgggcggtgccgtcgcggttgtcgcgcatgcgcagggcataacggcccgccgaattgcagttgacggtcagggtcaggtacttgagcggcaggcgtgtgccggttgcctggttgaggtcctgttgggagatcttgccgaagtcgaccagcccgccggcggacagcacgggtgtgcaggccatgggggtgatcaggccggtcaccgtcaagtcgacggtggaggcagcctgggccaacgagccgacaccgagcagggacacggcggccagggggatcaggtgagtcttcatcgcgtagctcctttttcagtgggtcagaggtagatgatttcgagggtgcccgagccgtcgagtcgcacttcattgctcaggtccagggtgtcgaggggggcgatgaccgcttcgacgttggctgtggcgctcaggtgttgaatcgcgctcgggccgttgctgctgccggcgctggcagtgaagcccagcaaacgtgtggcacccacgtcgatggggttggcgctgctgttgctccaggaagtgccggcggtggtggagtcggtgcgatacacctggggcaggttgtctgcggtggtatgcgcggggttgaagctcaaccgataacggccgatgttctgctgtcgcgcgtcccggcccaggccgtaggtgctgtcatcgtcggggccgctggcggtgccttggcggttgtcgtgcatgcgcagggcaaaaaagctcggtgcgtcgcaggccacgttgagcaccaggcttcgcggcgccagtgttgtctcctggcgcgggttcaggtcattgaccgacagtttgcccagcgccacggtgccgccattggacaggctgggggtgcaggcggccggtgcaaagcgcgtcgtccagcgcaattcgcgggcctggccggtgtggaccgcatcgaacaggccggcgctgtcccaggtcacggcgtcgcgtacccgcagggcctcttcgctggcccacgcccggccctccaggcgcaatgacaggctgcgaccgctggccgccacgccgttgcgtaacggtacgaccccgtgttccgggcgccaggtgagggtgctggcgctgctcaccggcggttggccggcggcggtaaccagccccaattcgaccgcctggccatccagcaccgcgtcggtcacccgcaggccgtagctgccccgttcggtgaagcgaaaacgctctgcgctggcgcccatggcgcggtagaacacactcacgtcggtgggctgctggcagttcagcgtgaggttgaaccggcgctcacccagcagccgttcaggcgtgggcaactgcgctgcggcgcggttcatcaggccgaaatccagctttgattcgctcaggctgagctggcagtcttccgccccccaggcgctggcactcaacaacaggatcaggggcaacaagtggggtttcaggcccatggcaagctcctcatgatgcgcggcactgggccggggcagtttcgaaatacaggtcggggtcggctttcttcggcagctcgaagtccagccggcaacgcggttggccggccgctttgatccacaacgcaccttgctcaagcacgttgggcaaaaacacctggctgccttcctgcaccaaggtcacgaactcgccgctgtcggtactcaccaccgcgccccgcggcaatggcgcaccgtggtcgttggtcacgctgagcaatgcgcgacgggtgaccaccacgccaaactgcacgctgtcgacggcaccgcgcccggccgacagcaccgccaggccgttgttgatatcggcgttgcgtggcagtgaacgggtctgcacttccaccgcactgcgaccgtaggcggtcagttgcggcaccacggcctggccttgccagtcggtccataccggcccgctgggggtgttcaccttgatcccggccatttcgcccacggacatcaccgcaaaggtgtcgcgcaccgggtacggcgagaaggtcacgccgtcgccatgcaccaccacgccgccacgggcaccgccctggtagctggcgttgtcggcattggagcgggtgtagttgaagtccaactggctgtagtacggcagggctgacacaccgagggacgattccacttcctggtcgcgactgtcacgttcaacgcccacccggtaactcaattgatcgttgagttgctcgctcacgcccaggcccaggcgatgctcgccgccggtgttgcgggcccaggcgcgggcgcggcgggtctcgcccagcggtaggctgatattcaggtacaggctgttgtcactctgctggcgaccgcccatttgccattcggcgctggccgacaccgatacccggccgaaactgctgccccacgacgccagcgcccggctgctgctgttgccgtcataggacgatgagcgggaaaccccggcactgaaggcgccaaactgcgggtgcgaccacgacgccgtggcgctctgttggtcacggtagcgcgtgcgttgttgttcacgggtggggtgacggtaggtggaatcttcaaggtcgcgataacccagggaacgccaggacgctgctgtgctgatcgaccagctttcgctcaagcgctgggaccaggagaggtcggtctgtataccttgttcgtgctgcacgcgagtggcttgagcggcttgcagcgtgccttgcaactggctgtcctgccagggcagccagcccaggttcaggcctgccgagcggtagtcctcggccatcagtgcacctgcacccacactgacttgcgggtgcagcgcaccgctccagccggcgctcaccacccagggttcggcgccgtcgtcgttgccgatcttgcgcacgcgacccgctgccaccgagtaccccggcgcgggcagccccaggccgagcatcgctgccggtacagtaaagcggcgttcttcgccgctggtttccttgaccgtgacttccacatccgagcgactgttcaagcgccgcacatcggtcagggagaacggcccggccggcaccaccgtggaatgaatcaacgtgccgttctggcgcacttcgacctgggccgggctattggcgatgccgttgatggtcgcgccctggttctggtcctgcagggcggtttcggtgaggacctgcgcgccggtgatctgggtgcccgccagcaccgggttgtacaggctgatctggccagcctgcagcaccgcctgttgggcggcgaaggtgcgttgggcgtaggcatccaggtgggtggtgcgtgaatagttgtcctgccaggtgcgcacctggcggctgcgcacaatccagtcgccggcgttgaaaccgacttcggtgttggccgagccgaagcggctgttgtcgtcgtcgtattcgttgtacagcccggtcaggtcatagttgagcaggccggcgaagccgccggtctggtagccggaaatatcctgggtgacggggcgcagtgcatccgtcggcaccaccagtgacagggtcagggcggcggggtcctgctcgatcacggtctgcggataggcttggataaacccgtagcacgcgccgtattgcgcactgtcgatggcttgctcgggcacgttgaggttgcctgcgtccagcagcccgcgggtgaaacacaaggcgccttgctggtcgaagaccgcgtccacgcgttcgcggcgctggccgttgacggtcaggttgactgcgtggcgtccgggggcgaagcgtggggcctccagcagcaggtgggccagttgggggtcgatgccccgttgggacagggtctgggggtcgaaagtgccccgggttgcggtctcgtcggccaggctttcgccgccgggcagcgtgctgcccagggccagtgccaggagccagcgcgagcggcgcgataaaaaaccgggcgcgacggtgccgtcgcggtcagtggttactgtgctcacaaggtcgtactcaatgtggtgaccttcaatgggaggtcacttcgttatcagggcgctggcctgtctgtgcctgcgcctgggatcagcgggtgagaggcgcgtcgtagggcgccacggcaaagccgtacacggtggccggttgcagttgcacggtggttgcgcccggtgcgctggcggtaacctgcaaggtttcccccggcagcacataagtgcgtggcagcagcgccgagccgttgccgggcagcaaacgcagctcctgggccaggcgcaccacataaggcgtagggttgtgcacgctcaactgctgctggtcgaggcgccaggtcaagccggtccagggcgaacgattgggcgccaggcccttggggtgcaggatcaccggcaggttctggcgcaccgtcacgccgacccgcgcatgcccggcctgggcttgcgagcgtccttgcggcatgccttcgaaaatcactcgtttcaggcgttgggttttcagcggctcgggcgattgcaggatgaaccggatgagttggctcttggacggctcgacccgggccaacggcggcgtgacgaacagcagggtggccttgtcttcggggatgtcttccagggtgacgtgcagcagggcgagccgcgagtcggtgttggtcactgacaccgacgcttcgccgtcggcttcgttgacgatgaccaccgacgtgtcgggcaccataccgtcggccagcacccatgtggggccgccgaatgtcagggccagcgcacccaggtagagaccggcgtagcggatggccgtgaaggctcgggttgaaaagggcagaggggacatggctacaaatacctcaggtcaagcacgatggaaccgtccagggggacttcctgcttgagggtcaaataggcggccgcattgatcgacgtgttgacttgcaaggtggccgtgatctggcggtgcggttccggcaccaacgtgccggggtgggcgaaccccatgtaattgttcgggtaggcattggtttccgggaaccaggtctgtccctgattgctggaggccagcactagcacgcgctcgccgtcgcccatcacgtcgcgaaaggcaatggacacggtgccgagtcgctcggtggggacgtggacgttgtggcccaggccgtagtaaaagcccgggcccagggatgagtcggcgcggttgtccaaacccaccaatacaaacagcaccgagtcgttgcagctcacgtccaagtccagggcttgggtgggcaagacactgaactcgaattggttgagcgtgtgtgccggcaccctgccgtggtcgacgatgccgttggccgacaacgtcggtgtacacgcgctgggcgtgatcagcccggtcacattcagttcggtgctggatgccgccagtgcagcgcagccgccactcagcaggcaaaacagggcaagaaggcgtgaagaggtgtgcttcatgggggaggttcaccggttgcctggttcatcgtttcaatacagcgcaacggcaggtgcgatggcctgccgctgtgcgtttcaaagtgggcttacaggtagcgcaccgtgacggtcaccgaaccgtcgatggccacttcgttggtcagcgtcaactggctggccggagcgatttttgggctgacggtcaggtccgaggtcagcacctgcaccgggatgggcgcgtcgacggcggtgtcggccaccgagatcaggttgtcgggcgtcaagttgcgcgcaacgacccaggtgacaccgccgtcgacagaggtgatcggccggcccgccacgccatcggcgaccggcgtgttcaggctgagggtcatggcgccgagcttttgcgtgccgttgatcaggcccaggccgaactccgtgatgtcgtcaccgtagttcgaacccggtcggttgtcgtcggcgtccagggccatgagggtggccgcgtcacaggtgaccgtcagttgcacggtttgctcggtaagcggggtgacctggtcgacattcaagtccctggcggaaatcttgccgtagtccaccgacccactgttggacagggcaggtgtacaggcgctgggggtgatcatgcccttgacggtcaggtcgacgctggaggcagcgaaggcgctggcgctgccgatcagcagggtggcggcgagcagggtattgagggatacattcatggtcagtctccaaaaaaagaaggtaaaaaaagggttaccagtacttgagctgcaacgtcgcgtgcccatcgatgggcaactcgtcgagcagggtcaggccgctggcgggggcgatgatggtgaaggcgcgcaggcgcgcactgagttcggtgatggcaatgggggtatagggtgctcccgctgccgaaaaggcggtcaatgccgcgtgccccaggtaggacgacggtccccagcttgcaccgccgtcacgggacatgatggtctgcaccggcgccgtgtcggccaccggctcgaacaacccgagcgcgacactgcccagcatctggtcatcgttgaccatccccagcccgtggaacaccgggttgatcgctgaggtgccgctgcggttatccaccgtggtgagggtgaagtgggtggcgccttcgcaatgcacttgcagcagcatctcgcccggttgcaggcgggtgggcaggtcgatgtccaggtcccggccggtcagcttgccatgatcgacgacaccgtcattggacaggcttggggtgcatgagctgggcgtaatggtgcccgtaacgctcaggtcggtattgctggccgcgaaggttgcgggggcgcaggcggccagcaggagggcaagtgtggcgcgggttcttctgtccatcggcacgggtccttgtgtgaagagaaaagaggggattacaggtagcgcatttccagggtggccgagccgttgagtagatactcctcggtcagggtcaggccgcgggtggcggcgatgtagccgtagatgagcaggttgctggtcaagttgcggatcggaaccggtgcccaggccccgcctgagtcgtcgccgaaaccggcgagtcgaccacggatccacaatgcgtttggcgagctctggatccaggtgacaccgttgtctcgtgaggacagggtggagatcggcagaccttcggcggtggagctgttcagccccaggtggtaagcaccgatggagcggttctggttgatcacccccaggccgtaggaggtatcgccgccgccttgaccattctccaaggcatgaaatgcaaacaacgttgcggcgtcgcattccacgctcagttgcaggttggcggtcggcaagaccgtggcgctttccacgtagaggtcggcgaaggcaatcttgccgtagtcgacaacgccgcctgagctgagggtaggcgtgcaggcgttcggggtgatcacacccgtgacgttcaggtcggtactgctggcagccagcgcaggggtggctgcggccatcagtaaggtggtgagaagcagggaatgtgggactttcatttgaacaacatattcctgagcaaagtgttggcacgaagggcagtgagtggctcgggtgaggcgctggcgtcgagggttggattgtttttgtgggcgacgacgcgccttctggttgtgttgagccgggacgcatttaacgcccgttcccgacggtggcggaatgcaacaattacgatagtgatgccgccggatgaacctctgcagcgtcgattgaaacggctgacgcgcttgtaagaaaaagtgcttagtcgtagttgttgtatcgccctattacattcattcggatatttttcgcgctctcttaatccgcacagtctgtttttttgaacaggtctgaatgtagttgcgcgaaaagttcgagtgaaatcgtccggcaggtcatcaacctctcaggcgtctccctgcgccaggtgcacgcctggtgagctgatcgctctgcatgaggttgttatgccgggcaatgatccacgtcgtcatccacgcaaggcctcgcactcgactgccgcgccatcccattggcagcaagccagagtcctggtggccgacgaccatgccacctaccggttgctggtggggtcgttgctccaggtgctgggtgtcggccacgaaacctgcagcgacgggcgcatggccttgcaggccttggctgcgcgtcactttgatctggtcatcagcgattgccgaatgcccgtcatggatggttatgccatgacgcgcgaattacgccgacgtgaacgggctgcgggcaggccgtgtgttcccgtcatcgccatgaccggtcgcctgggccgggaagagattcgccgttgcctggaatgcgggatggatgggtggctggtcaaaccggtcagcctgaggcagttgcgcgagttgctcaccgaatggttggcgccaaggccgttgcatgcggagcagcgcaagcagtcgttgccgcgtcgacgcgaagcgctgccttcgcgtgcccgccttatcgcgacctttggttcctggacggtggtagaggcgatgttggcgagcctggtgctcgaggcccgggacgacctggcagtgctggagcaggcgcgcatcagcggggatgccctgttgacctcgcagcgcttgcaccgcctggcgggcagtgtggcgttcctgggggcaacgcgattggagcagcacgccgccaggttgattgaccgcgtgcaggccagcggggtggaggtgaatcggcaggcactcgagctgtttcatcgtgacgtcgaacgttacctgcagcgtttgcatcaactctgaatccagggatttgtaagagttttcatgtatgaagtgtaggaataatctgtatgtaatttctttttattgtgtgggctaaatgttgctctccaataactagggggagtaggaagagccgtccagttatttcaggttgttgcatagggctgagcgagctattttgcatgtattcaaattgccatcatgggtaacgacgatgattcgcataattattgctgacgatcaccccatcgtccgtattgggcaaaaagtggtaattgaagccagtggtaagtgcaaagtcgtaggggaggccaatggtccggatgaattgctggcgctggtgaacagtaccgcttgcgacgccatcgtgaccgactttgccatgccgggcgatcagcaggcggatggctacggactgctgggtttgttgcaccggcaatacccgaggttgccggtgatcctggtgaccatgttcgccaacgtggtcacgttgcgcgaggcattcgcccatggcgcgcgggcgatcgtggccaagagcgcgtctgcacgggagctgcccctggcgctgcgggcggtggtcgaggggcgtacgtttgtcagtgagtgcctgcgcctgcagatggagcagacccaactggcgcatccgtcccagccacaattgtctggcaaggagcgagaggtggtaagaatgctcgccagcggcatgaccgtcagccagatcgccgcgcgggtcaaccgcagtatctcgaccatcagcaaacagaagagcacggccatgcagcggctatgcatttccaccgatgtggatcttttcacctatgcgcggcaaagcggcatggtgccttagttgttgtgcatggcgtgaaagtttcagatttattatgtagttaatcaggatattcgtattacttgtatggggcagtagtgtggggcgagttagtgtgtgttcatgtacccggcagtgataagtcggcggcataactacctatgtccaacacagggtcaggcggaggcgagtgtcttgttattcgacaaggcaagcgtttccgttttgccttgaatgcgagcacttgaataaatgaaacaatcactttcccttgttaccagcgcttttctattgatgggcgcctcgaacttgtttgcggcttccagtattgacctgagtgtcgtgggtgccttgaccccttccgcctgcaccccggctttgtccggcggcggcgtggtggatcatggcaagatttccatgagtgatcttccttttgacgcctacctgcctgaggcgacgctggcgttgagtgtcaactgcgaagcatcgacgctgatggcggttatggctaccgacaatcgccccggtactgcttggtacggctacgacactgatagcgcatttggcctgggactttacaatagccggcggtggggcgggtatcagctcctcgtgaaaaacgtccaggcggacggtgcagcggcaccggcgattgagtccgtggatggcaaaacctggtttcccgcgcccgaagaccaaacctggcaagtgggctggatgcgttcggtgggggcggtcggtgaagttgacgcgctgccggtaccggtccagaacctggcaatggaagtattgatccagacccgcgtcaggaagcctacgggcgctaccgaggaagtccctttggacggcagcgccacgctgagcatcttctacctctgacccaccctcgcttatccaccgggtgaatgagcatggtgtttccgggcgccgcggattatcgtgctggccttatgccgataactgcggagcctgcccatgagtgatgcccacaacgccttgatcaccgagttctacagcgcgttccagcgcctggacgctgaagccatgtcggcctgctacaccgacgatgtggtcttcagcgacccagccttcggcgaactgcgcggccgggatgccggtgacatgtggcgcatgctcaccacccgcgccaaggatttctccctgaccttcgacaatgtgcgcagcgacgaccgtagcggtggcgctcactgggtggcgacttacctgttcagcgccaccggtaatacggtggtcaatgatatccaggcgcgctttgtgtttcgcgacggcaagatctgcgaacaccatgacagcttcgacctgtggcgctggtcgcgccaggccttgggcaccaagggcttgttgctggggtggacgccgctggtgaaaaacgccgtgcgcgcccaggcacgtaaaggcttgaaggcattccaggccagtcgttgataagcttggcaattcctatgccttgccgaatcgatccgtgaatacgcctgaccccaaaccctggttcgtctacctggtgcgcgccgccaatggcgcgctgtattgcggcatcagcaatgacccggtgcgccggtttgcctcgcaccagagcggcaagggcgcacggtttttcctgtccagcccggccgttgcgctggtgtacaccgagcaatgcgcgagcaagggcgaggccctgcgccaggaacgcttgatcaagaagttgaagaagagcgccaaggagtgcctggcggcaagcggctcattgatttgactgatgggttcccatcatgcccgcgccagggtttgcaggctaagctagcgattcacttctctagcggagcctggcatgtccgaattgatcctgcaccactacccgcagtcccccttcgctgaaaaagcccggctgttgctgggctacaagggcttgtcctggcgctcggtgcatatctcgccggtgatgcccaagccggatctcaccgcgctgaccggcggctatcgcaagacccctgtgctgcaaatcggtgccgatatctactgcgacaccgcgttgatcgcccggcgcctggagcaggaaaaagccgcgccggcactgtttccccagggcctggaactggttacccaaggcttcgccgcctgggccgattcggtggtgttttcccatgcggtggcgctggtgttccagcccgaatccctggcggtcaagttcgccaaggtgccgccggaaatgctgcaggtgctggtggcggatcgcagcaagctgttcagcggtggcacggcgactcgggtgcaattggatgtagccaagcatcaatggccggcgattgtcagccgcatcgaccagcaactgcagcaccaggccggggatttcctgttcggcgagccatcgattgccgacttttccctggcccatcccttgtggttcctcaaaggctcttcagtgacgtcgcctttggtagacgcccatcccgccgtcgccgcctggttggatcgtgtgctgggcttcggccacggtacatccactcagatgagcgccgagcaagccctggacgtgtcgcgcaatgcggcaccggctgcgctgcccgaagaactgtttgaagacttgaacggtttcaaggcaggccagcaggtgaccatctccgccactgactacggcaccgaccctgtcgccggcgaattgctgtttgccgggcgtgaagagctgatcctgcgccgcaccgatgagcgcgcgggcaccgtgcatgtgcatttcccgcgcatcggttttcgcatccaggcgcagtagggaaaaatatttgcaaataaaagtgaggtaaatccaccgcccaaccgtgtagtgcttgaaactgcgatctattcgcattaacagcgttttctacacgggttctcacagcatgaagtcagcggcgggcggttgggtaaaacagtggctgggagcctcggcattggcggtatcggggctggcgttgctgcccctgagcgtggtgcaggcgcaggagcagcaaagtgcccagttcaactttgccctggcagccaagccgctgccccaggccctgagcgatttcagccgggtcaccgggatcagcgtgatctacaccgacgaagcgccctacggcatcaaggccccggcggtcagcggccagatgagcgccacccaggccctgcaacgcctgctgggcagttccggcctgaccttccgccagatcgacgcccgcaccctggcccttgagccggcgcctaccgaaggcgcggtcaaccttggcgccaccaccatcagcggtgccaaccagacccaggacagcaccagctaccaaccaccgcccaccagctcggtgatgcgctcccatggcctgctgctggaaaccccgcagaccgtcaacgtggtgccggcccaggtgttgcgcgatcagaccccgcgcaacctggatgacgccctgggcaatatcagcggcattacccaggccaataccctcgccagcacccaggacgcggtgatgctgcgcggctttggcgacaaccgtaacggctcgatcatgcgcgacggcatgcccatcgtgcagggccgcgcgctgaacgccacggcggagcgggtcgaagtactcaagggcccggcgtcgttgctgtatggcatccaggatccgggcggcgtggttaacatcgtcagtaaaaagcctgaactggtccagtccaccgccctcaccgtacgcggctccaccttcggtgacggcaagaacggcagcggcggcagcctcgacaccaccggcccgattggcgacagcggcctggcctatcggctgatcgtcgatcatgaagatgaggattactggcgcaacttcggcacccaccgcgagagcctgatcgcgccgtcgctggcctggtatggcgacagcaccaaactgctgttcgcctacgagcaccgcgaattcctcacgcccttcgaccgtggcaccgccatcgacaaatccaaccacccgctggacatcccggccacacgtcgtttggatgaaccgttcaacaacatggaaggccgttccgacctgtaccgcttcgaagccgaccacgacctgaacgacgactggaaagcccacttcggctacagctggaaccgcgaaacctatgacgccagccaggtgcgcgtcagtgcggtgggtaataatggcgccctgacccgcaggatggacggcaccaagggtgcgatcaccactgaccgctttaccaccgcgagccttgaaggcaaggtcaatgtgttcggcctgcagaacgatctggtgtttggcctggatgatgagtaccgcaagatctaccgggctgacctgattcgccagaactcccgtggcaccttcaactacaacaacccggtgtatggcaacgaagtggcgggtactaccgtcagccccgccgacagcgcccagaccgacctgctgcgcagcgactcgctgttcttccaggatgcgattcacctcaacgaccaatggatttttgtcgccggtgcgcgctaccagatgtatgaccaatacgcgggcaagggcgtaccgttcaaggccaacaccaacggcaacggccaggcctgggtaccgcgtgcggggctggtgtaccgctacaccgacgagctgtcgttctacggcagctacaccgaatcgttcaaacccaactccaccatcgccgccttggccgatggcagcacgctgaccggcgacctgacgcccgagaaatccaagtcctgggagctgggcgccaagctcgacatccccgggcgtatcaccgccagtgctgcgttgttcaacatcgacaaacgcaatgtgctggtgtcatcggaagtggctggaagcaccatctatagtctggctggccaggtgcgctcccgtggcctggaactggacgccaccgggcaactgaccgacaagtggagcgtgatcggcagctacgcctacaccgacgcggaagacaccaaggacaaggacccgaccctggaaggcaaccgcctgcagaacgtggccaagcacaccggctcgctgtcggtggcctatgacttcggcaatgtgttcggtggcgatcagttgcgggtaggcaccggcgcgcggtatgtcggcgagcgagcaggcgatgccgccaacgacttcaccctgccggggtataccgtggcggatgcgtttgccacgtacgacaccaagatcgatgggcagaaggtcaagttccagctcaacgtgaagaacatgttcgaccgcgtctactacacctcggcggccagccggttgtttgtgtccatgggcgatgcgcggcaggtgtcggtgtcgagcacgctggagttctgatgcgcctattgtgtggcgagcctgctcgccacagggggagggagctgttagcgttgctgccactgacagctttaggaaaacgctactgatgtactttggaaaatggatacccaccagcgggctgctggtgggcttgagctttttgctgggtggttgcgcgagtgtttcccagacgtccaccccaaccatcatcgaccaattgatggccgacccggccctccatggcgccactgtttccctgatggtgcgtgatgcccgcagcggcaacaccctctatcaacacaacccgcgaacccgcctgattcccgcatccaatctcaagttgctcaccaccgcagccgcgatggatgtgttggggccgcagtatcgtttttccacgcaactgttgagcaacggcacgcagcagggcgagcgtctcagcggcaacctgtacctcaagggcctgggcgatccgaccacgcaattcgccgactaccaggcattggcggcacagcttgcagccctgggcgtgcgtcaggtccagggtgacctggtgttcgacgatacctttttcgacgccgaacgcttgggcgtggattgggcccaggacgacgaaagcacctactacggcgcgcagatttcggcgttgactgtgtcacccaatgccgattttgatgcgggcacgctgctggtcacggcgaaggctcccgccgtggtgggtcaaccggtcagcgtggtggtgagcccggcaaccgactatgtgcaagtgaacaaccgcgccgtcagcggccccggcaacagctatggcattacccgccagcacggcaccaacctgctgcaactcagcggtgcgctggccccaggcaagcaaagccggcagtgggtgagtgtgtgggagccgacgcaactggtggccaacctgtttgaacaggcgctggcgcagcagggtatccaggtgctgggccgtcgtgtgataggcagtgcaagtccagcgacggccaaggtgctggccgaacatcagtcggcaccgttgcaggaactgatcacgccgctgctcaagctgtcgaacaacaacatgtccgaagccttgctcaaggccatggggcgcaagacgtccaacgcaggcacggcacaggcgggggttgctgcggtgggggacttcatgcggcgccagggcctggacccgatgacgctgagccaggtcgatggttcgggtctgtcgcggcgcaacctggtgtcttcccaggggctcactgatttgctgctggcgacggccagacagccctggttcgacgcctggtacaacgccttgccgattgccggcaacgccgaccgcatgaccggtggcagcctgcgctaccgcctgcgcgggacggctgcgcaaaacaacctgcacgccaagaccggctccatggccggtgtgtcgtcgttgagcggctacatcaccgacgccgagggccggcgcctggtgttttcaatgatcagcaataactacctgagcaccgccgcaccgatccgcgccctggaaaaccgtgtggcgctggccctggtgcaatggcacgactagctcagggctgataacccatacgccaactcacagcccggctcgccgccagcaagcgctgcgccgccgggccgtcttcatcggcgtggaacaacgaggtggggccgaccacggtcatcaccgccgccacctgcccgatggcattgaacaccggcgccgacagcgcatcgacaccgggcatcagcaaaccatgcacaaaatgcaggccacggctgcggatctgttcacaggtggtggcgtaggcctggtcgtccgccagagcgtgggcgatgccggcctggatctcacgctcgcgcagctcaacggtttcccgcgacggcaggaaggcgctgaacaccagcccagtggatgaactgagcagcggcagcaccgagcccagttgcgttaccaccgtcactgcgcgcactgctggttcgatctgcaccacggtcgcgccctggttgccccacactgccaaaaagcaggtttcattcaattcatcgcgcaactccgccaggggcatggcaccgactttcagtacgtccatgctgcccagcgccgccaggccaacccgtaacgcttcgcggcccaggccatagtggttggtggcggtgttctgttcggcgaaacccgaggcgatcagcgcctgcagataacggtgcaccttgctggctggcatctgtacatgttcggccaggcgtgacagcgacgttgccggggacaactcggccagggccttgaggatatcggtgcccacttcggccgagcggactttctgtttaccggtgtcgcggggcttttccatggaggggcgagaatccgagagatgaatgggcgtctttatagcttgacggtcgatagtgatcaaattacgttatgcgtaactggattacgataaaaacaacttccgtacagaggatgatccatgaacctcgaatacctgtcgggcttcggcaatgaattcgccagcgaagccttgcccggcgccctgcccgtcggccagaactccccgcaaaaagcgccctatgggctgtacaccgaactgttctccggcaccgcgttcaccatggcccgcagcgaagcccgacgtacctggctgtaccgcatccagccgtcggccaatcacccggcgtttatcaagctggagcggcagttggccggtgggccgttgggggcggtgacgcccaatcgactgcgctggaaccctttagatatcccgagcgaggcgacggactttatcgatgggctggtaaggatggtggccaattcgggttcggaaaaaccctcgggcatcagcatttataactaccgcgccaaccgctccatggagcgtgtgttcttcaacgccgatggcgagttgttgattgttcccgagcaaggccgcctgcgcatcgccaccgagcttggcgtgttggaagtggcgccgctggaaatcgttgtgttgccccgtggcctgaagttccgcgtcgagctgctggatgcgcaagcgcgcggttacgtcgccgagaaccatggtgcacccttgcgtttgccggacctgggtcctatcggcagcaacggcttggccaatccgcgtgatttcctgacgccgattgcccactacgaagatgtgaagaaacctacaacgctggtacagaaattcctcggcgaactctgggcctgcgagctggaccattccccgctcaacgtggtcgcctggcacggcaacaacgtgccgtacaaatacgacctgcgccgcttcaacacgattggtaccgtcagcttcgatcacccggacccgtcgatcttcaccgtattgacctcgcccaccagtacccacggcctggccaacctcgacttcgtgatcttcccgccgcgctggatggtggccgagaacaccttccgcccgccatggttccaccgcaacctgatgaacgaatacatgggcctgatccagggcgcctacgacgccaaggccgaaggcttcctgccgggtggcgcatccttgcacagctgcatgagcgcccatggcccggacggcgagacctgcaccaaggccatcaatgtggaactggcgccgcacaagatcgataacaccatggcgttcatgttcgagaccagccaagtgctgcgcccgacccaattcgccctggactgcccgcaactgcaaccttcctatgacgcgtgctgggcctcgctgcctgccaccttcaacccgaaccggagataacccatgactcagcccacacttacccgcagttgggtggcctccgccaacggtcacaccgacttccccctgcagaacctgccgctgggtgtgttcagcatcaacggcgcggcaccacgcgtcggtgtggcgattggtgactcgatcctggatttgcatgccgccatcgacgaattcagtggcgaggcccgccgcgccgtcgaggccaccgctggtggtcaactgaacgccttgtttgaactgggccgtggcccgcgcgtggccctgcgcgagcgtttgctggagctgctggccgaaggcagccagctgcaaacccgcgaggcgcaggtactgcaccgcgccgccgattgccagatgcacgtaccggcacggatcaacgactacaccgacttctacgtcggcatcgagcacgcgcagaacgtcggcaaattgttccgtcccgacaacccgctgctgcccaactacaagtacgtgccgattggctaccacggccgcgcctcgactatccgcgcctcgggcaccgacgtgcgccgtcccaagggccagaccctgccggccggccagaccgagccgaccttcggcccgtgcgcacgcctggactacgagttggagctgggtatctggatcggccagggcaatgcgatgggcgattcaatcgccatcggcgacgcggcggaccacatcgccggtttctgcctgctcaatgactggtcggcgcgggatatccaggcctgggaataccagccgttggggccgttcctgtcgaaaagcttcatcaccacgatctccccatgggtggtcacggcggaagcacttgagccgttccgcaaagcgcaaccgccacgccctgaaggcgatccgcaaccgttgtcgtacctgctggataaacgtgaccaggctgccggtgccctggatatcgaattggaagtgttgctgaccaccgccgcgatgcgcgaacagaagctgccggcatttcggttggccctgagcaacagcctgcatatgtactggaccgttgcgcagttggtggcgcaccacagtgtgaatggctgccagttgcaggccggtgacctgtttggttcgggcaccttgtccgggccgcaggcgggccagttcggcagcctgttggaaatgaccgaaggcggcaaaaaggcggtcgagttgccgtctggcgaggtgcgcaaattcctcgaagatggcgatgaaatcatcctgcgtgcacgctgcagcagggaaggctttgcctccatcggcttcggcgaatgccgtggcaccgtggtcgcggcgcgctaggagggcagggcgatggaactctacacctactaccgttccacttcgtcgtaccgggtgcgcattgccctggcgctcaagggcctggatttcaccgccgtgccggtcaacctgctggtaccggcgggcggtgccaatcgccagcccgagtacctggcgatcaacccgcagggccgtgtgccggcgttgcgcaccgatgagggcgagctgttgattcaatcgccggcgatcatcgaatacctggaagaacgttatccacaggcaccgctgctctccaacgatctgccgacccgagcccatgaacgggcggtggcgtcgatcatcggctgcgatattcatccgctgcacaattccagtacccagaatctgctgcgccagtgggggcatgacgaggcgcaactgctggaatggatcggccattggatcagccaggggttgggtgcggtggagcagttgatcggcgacacagggttttgcttcggcgagcagccggggctggccgatacgttcctgattccccagttgtacgcggcggaacgcttcaaggtgccattggcggcgtacccgcgcatcgggcgggtggcggcgttggcggcgcagcatccggcgtttgtgaaggcgcaccccgccaatcaacctgacacgccttaggacccaatgtgggagggggcttgcccccgattgcggtctatcggcaatgaatgcgtcgacggtgccaccgtattcgggggcaagccccctcccacattttgactgcgacacccttataaaaataataggtaccttgcgatgcacaatcagattgccagctttcgcgcggcactcgacgcccgtccggtgtcgcgctatcagtggttgattctcctgttactggcgctgctgctggtgaccgatggctacgacgcccaggtcctgggttatgtggtgccggcactggcgcaggattgggggttggagaaggctgccttcggcccggtgttcagcgccaacctgctcgggctgaccttgggctcgttgctggtcacgccgctggcggatcgtttcggtgtgcgtcgtatcctgctcggctgtgtgctgatctacgccaccctgactgtgctgatggtgttcgccaactcgctgaccacgttgatggccgcacgctttatctgcggcattggcatgggcggcgccatgccgagtgcgatggccttgatgtcggactattccccaccacgcctgcgcaccttgatggtgaccttggcggcttgtggtttttcgttcggcggggcggcgggtgggtttgtggcggcggggtttatcgaaggctttgggtggcaggcggtgttcctcgccggtggcgtgacgccgctgctgctgttcccgtttctgatgtggctgttgccggaatcattgccgcgtctgctgcgagacgcaccgccttatgcgcggctgcaaagcgtgacgttgcggatgttgccgggctggcaaccgccgctggccactgaggcggaaaaccaacaggagcagggcagcaaactgacggtggtggagttgtttcgcaacggctacgcgcgcccgactgtgctgatctgggcgaccttttttgtcagcctgatcctgctgtatttcatgattagttggttgccatcactgctgctggaaagtgggctggcattaaaagaagccaacctggtgacttcgatgttcctgttcgccgggaccttgggcgctatcggcatggcctggttcgccgaccgtttgaaaaacaaagtgcgtctgttgtcgggcgtgctggcggctgcggcggtgtgcaccatcctgctcggtgtgaaccatgacaacccgcgttacctggtagcctgtgtgtttgcggccgggttttgcatcatcggtgggcaattgaccctcaatgcctttgccagcaatttctacccggcacatgtgcgcgccacggggacgggctgggcgttgggcgtggggcggtttggttcaatcctggggccgttgtttggcagtatgttgctggcgatgcatatcccggtgcagcagattttcttcttttgcgcgatcccggcggtggtggcggcgttgttgatcattcaggtgcgttcgcctggggttggggcggcgaagagcccgttgcccggcgacattttcaagacaccagccaatcactgacgcgggcttcacggcgagcgcccttgttgtggcgagcgggcttgccccgcgttgggtcgcgaagcggcccctgaattgggcctgctacgcagtccaacgcgggacaagcccgctcaccacagaaagaaatgatctcttggaattcgtgtgttcagtgcaccactgaattgggcggcaaatgccccaggcgttcggtcaggcgcaggcgctggatcgggtcttcgctgagcatcagcgcgtgttccaggtcgaaacgctcggcgttggggcagtccaggcgctggtacaggctggcccgtgccaggtaatcggcggcgctggcattgcccagttccagcacacgttcggcgtcgaccagtgcctcgagcggggcgtcgttggacaggtgcaattgccgcaggttacgtgacagccgctgcaggatcgaacgcgggtcggcggtgtgcaggtggtcggcctgcagcttgaggttggggccgtactggcgttgcagcaggtcgcggcaatcattggggtacaggcgtcggccgccgcacgggtccaacaggtgatcggcaccgggtacgcgcagcaggaaatgcccggggaagttcacgccgaccatgggaatatccatccgtcgcgccagttccatggcgatcagccccatcgccaggggttgtccgcgcttacgttgcaacaccttgtccagcaaggctgccgcggggcgcagcggagtgaattcatcctgggcaaagcccaggtcattcaggcgccgcagcagcggttgaccgagttcatccgccggcagcatgggcatgccgatgctcacctgttgttgcagcagcgtcagttcttgcatgacaactgacggctgcaccgccgggtcatgctcggcagcaatccacagcgccgcttcaaacagcgcgggcggggagcgttccaggcaggcgaaaaaggctttgcgggggttcattgcattctccggcggatgcccccgttttagccttgctgggaattttcgtccagtggcttgggaaatatcctgcgcgcttatgtcgcaagtcctacgaaatcgaacggcttattccagcgtattccggcagttttctaccgcaagcctatacttggcccactaccagaagtgactcgggagcttgacgatgtttgctctcatgcacagcacccgccttgaatcgctgcacttgagcgtcgacccggtcaccgggctgaaggcggtcattgccatccacaacagccgcctggggcccgccctcggtggctgtcgctacctctcctatcccgacgacgaaagtgccgtggcggatgccgcgcgcctggcccagggcatgagctacaaggcggccctggccggtttgccggtgggcggtggcaccgccgtgatcctgcgtcccgcccatgtggaaagccgtgctgccttgtttgaagccttcggccgttgcatcgaacagctcgacggacgctacatcacggccatcgacagcggcacttcggtggccgacatggactgcatcgcccagcacacccgctacgtcaccagcaccaccgccgcaggcgacccttcgccccacgccgccatgggcgtgttcgccggcatccgcaccaccgccatggcgcgcctgggcagcgacaacctcgaaggcttgcgcgtcgctatccagggcctgggcaacgtcggcttcgccctggccgaacagctgcacgcggccggcgccgaactgctggtgagtgacatcgaccacggcaaggtgcaactggccatggagcaactgggggcgcaccccatcgccaacgacgccttgctcagcacaccgtgcgacatccttgcgccctgcggtcttggcgccgtgttcaaccgccagagcgtcggccaactgcgctgcgccgccgtggccggttctgccagtgcccaactgacccacctggacaacgccgatcaactggaggcgcgcggcatcctctacgcaccggactacgtgatcaactcgggagggctgatctacgtcgccctcaagcacagcggtgccgagttgccgtccatcaccgcgcacctgtccaacatcggcacgcgcctcaccgaaatcttcgcccacgcccaggccgaaaaacgctcacccgcccgcgtggccgacgaactcgccgagcgcctgctttaccaatagccaggtattaaaaaggccctgaaccaaagattcagggcctgttcaattcgggctttattccgccgctgcgttcagcaactcggacaacgcgtccggctggctcttgaacgccttggcaaacacatcgcggttcttcgccatgtagatcccggcttcttccacctgctgctcgctcagggacggcacggctttttgcaacacttctgcgagcaactcagcgagttcaagcatcttgtcatgacggtcagcttcggctttatccatgaacaaacgctccagatctcggctgctgcggtataccacttcgacggccattcaccacctcacatgccttcacgatagttgtcttttgcgactactgtatttatatacagcgaaaagggtaagccaaaccgtggggtttgggtagcagttttttaatgtagtcgggaaatgggggtttgctacaacggaaatttctgacaacttgccggggttgcgctggaattgtccggcggcttaccttcctcgggcgctgcattggcagcgaatgggcttggcggcccaacaaggaagcgcaacaaccctctatgagatacagatgcttttttgcatttgtattcttatgtcatggcgggttgcgcatggacccctcggggtgccgggtcgttccttaccggtccgccaaccttgtgcaatccgtcacccaacctgcttggcggcagacggtgatggtttctttactaaggaactagaccgatgaagaaaatcactcccaaccctccgtctatcgattcgacgctatttcgcgttacacctgaagctgacacagaaacattactggccaacgccagcgaaactctaagcagcgcccgtgaaatggccactacgctggcattcgaccttgacggtccgcagcggagtctagtgttagccattcaccaattggttgagataggctgtctgttagtcgaccgagcgttagagaaagtcgcaccagtttgatgcttcgccctctgaccgctcccgcggttgcgggagcggtcaaaacatggtctcggtggcttcgattttttctgttactcacttgatcgctcagaacacgacagcgaaaacgccagcgactagactccttcttcatcgacaacggaggcttttatggacacttccttttcctctggtacccaggcagataccgaagagcaggccgatagctacgaccgctggtttcgcgccaagatacaagctgctcttgaagacaccagccccggcattcctcacgatgaggtgatggccgagatgcaagcgctgatcgagtccaaactcaagaaaggcgatgctgattgagtgggtgcccgcagcgcgggtcgaacttcggcaaattattgaatacctcaatcatcgcaatcctgtagcagctcttgagctaaagcgctcaatcgaagcttcagttctggctctctcccgcagaccccatctttaccgtcctggcagaatcctcggtacgcgcgagatggtggtacatccgaattacctggtcgtttacaaggtgacagacaacattcgggttctctctgttttacacgcacgccagcgatatccctgaccgatccgtacttcggatgagcatagtttctactctgctcatccttatacgtgtctcatgtcaccccgccatcatcttatacccgcccctggccttttttctgcatgcagaacaaccgtcacgtccaacccgcattatccggtcgagtcgacctaaggaagcatcatcgtgaaaatcaactgggccgaaaggctgcgccagcaagtacacgggctggccgagtccctgggtaacctgttcgtcgagtcgttccactacctggcgctgttcgccattggtgcggtgacggcctgggcggcggtgatggagtttctggggatgctggagaacgggcacatcaagatcgatgacatcttgctgctgttcatctacctggaattgggcgcgatggtggggatttacttcaagaccaaccacatgccggtacgcttcctgatctacgtggcaatcaccgcgctgacgcgtctgctgatctccaacgtgtcccaccacaacccgccggatgtaggcatcatctacctgtgcggtgggattctgctgctggcgttctcgatcctggtggtgcgctacgcctcgtcggcgttcccctccgtgaaggtcgaaggcccgcgtcgcaagggcgaggcgagcctggaaaccgagaagggcgagctttaaagcccgacgctgaagggcagggtgcgggtaggcggccgctggagcactttgtggtcgccatccgtcatcaccgtgaggatgtccaaggcgctgtgcccctgttcgatggcaatgccgaactggatgctttgcaccaggcgcttgagtcgctttggatcgttgcgttgttcggcgctgatcatgcgtttggccaccacgccttgttcgttggagagggtcagcatgatgctgccgtccaaccgttggatgctcaggttgacacggtattcgggcgtgaaggtgtcggtgatgatctgaaaagggttgtccatggtgcgttaccgcctgataagaacatgcagtcattgacgaccggtatcgggattagttcgcgttgcctgaccaccggccactccgtcgctgaggtttcacaaggtccgtttgcctccacagctgtacagcaaaggccgtgccgtgcggcgctcgtatcccaatgtgggagggggcttgcccccgatagcagtgtgtcagccaatgaatgctcggctgaaagaccgctatcgggggcaagccccctcccacagttgtttcgggttgtgcttgaggtgggtgacctgtttcagggcagtaccgagaaaacgatcgcagacagcgcaatcaagccgatcaccaccacaaacaggttcgacagctggcccgaatactggcgcagagctggcacgcggcggattgcatacatcggcatcaggaacagcaggcacgcgatgatcggcccgcccatggtctcgatcatgcccaggatgctcggattgaaggtggccacggcccagcaggtgagtaccatgaacagcgcggtgcagcgctccagccatttcgacgacatcgaacggttacgaccgcgcagggatttgacgatcatgccctgaaagccttcgctggcaccgatgtaatggccgaggaaggatttggtgatggccaccagcgcaatcagcggcgcggcgtaggcgatcaccggcgtctggaagtggttggccaggtacgacaggatcgagatgttctgcgccttggctgctgccaggtcggccggcgacagtgccagtacgcaactgaagcagaagaacatcacggtcagcaccatcatgccgtgggcggtggccaggatgccgctgcttttacgctcggcctgggcgccgtacacgcgtttctggtcgacggcgaaggcggagatgatcggtgaatggttgaacgaaaacaccatcaccgggatcgccagccacagggtcttgaagaatatcggcaggggcatgccctcgctggcggaagcgaagaacgcgccgttccagttgggaatcaggctgattgccagcaacagcagcgccgcgacgaacgggtacaccagcacgctcatggccttgacgatcacgccctggccgcaacgcacgatggccatcaggccgaggatcagcaccagcgacaggatcgcccggggcggcggggtcatgtgcagttggtgttccatgaagctgccgagggtgttggtcagcgccacgctgtacaccagcaggatcgggaagatggcgaagaaatacagcagggtgatcagcttgcccgcgccgatgccgaagtgctcttcgaccacttcggtgatgtcgccggatttgcctgacagcacaaagcgcgtcagcccacggtgggcgaagaaggtcatcgggaaggccagcagtgccagcacgatcagtggccaaaaaccgccgacgccggcattgatcggcaggaacagggtgccggcgccgatggccgtgccgtagaggccgagcatccaggtggtgtcatgttgggtccagccggtggtcacggttgcttctacagcagggttttctacggcaggtgtacgtacatcggtcatcgttattgcctcgttattatttttgcgcgggctcacgttggggcaggtagcagtgctccgatcagcactccacccagctgaccgccaggccgccccgtgaagtttctttgtatttgtcatgcatatcggcgccggtatcgcgcatggtgcggatcacccggtcgagggaaatgaagtgtttgccgtcaccgcgcagggccatttgcgtggcgttgatcgccttgacagcggcgatggcgttgcgctcgatgcatggcacttgcaccaagccgccgaccgggtcgcaggtgaggcccaggttgtgctccaggccgatctcggcggcgttttccagctgctcgggagttgcaccgagcacgtccgccaagccggcggcggccatggcgcaggccgagccgacttcgccctggcagccgacttcggcgccggagatggaggcgtttttcttgcacaggatgccgacggcggcggcagccaggaagaaattgaccacatcgtcgtcggacgcgtcggcattgaacttcatgtagtaatgcagcacggccgggatgatcccggcggcgccgttggtcggcgcggtgaccatgcgcccgccggcggcgttttcttcgttgacggcgagagcgaacaggttgacccattccatcgccgacaaggtggaggtgatgacattcggcttgccgatttccaacaggctgcggtgcagtttcgcggctcggcgcggcacgtccaggccacccggcaggatgccttcatcgcgcaggccttgctccacgcattcgcgcatcaccgaccagatatgcagcaggccgctgcgaatatctgcatcgctgcgccatgcgcgttcgttggccatcatcagttcggaaacccgcaggccgtgcttgttgcacaaggccagcagctcgacggcgctggagaagtcgtagggcaattgcacatcgctggtcggcgcaatgccagaggctgcctcggccgcttcgataatgaaaccaccgcccaccgagtagtaggtctgctcgctcagcaggccgttttcaccgtaggcatgcagggacatggcgttgggatggtagggcaggctttcgtccagcagcaggaggtcggtgtgccagttgaaggcaatctcctgttggcctgcgagcaataggcggccggattcgcgcagttgctggatacgggcattgatcgaggtgggatcgacggtgtctggccactcgcccatcaagcccattacgcaggcgcggtcggtggcatggccgacaccggtggcggacagcgagccatacaagcgcacctccacacggtgagtgtggttcagcagttgttggtcgatcagggcctgtgcaaaggtcgccgccgcgcgcatggggccgacggtatgggagctggaagggccgatgcccaccttgaatagatcaaatacactgatagccatgctaaagccttacaagcaatggagtaggaatcgctgccatgttttgtaggacgagcgcaattggcgcgatactgagcctctagcacggcactgaccaacgaattatcctaagacaccctttagcaggactaaacgctatgacccggccccttcatggccagacgtatgtctggctgcacgttttttcctgtgcagcgcggcacctgtcgttcacccgttgcgccgaagaactgcacatcacaccgggcgcggtgagccagcaaattcgtcagttggaggagcgattggggtttcgtttgtttcatcggcgcgcccgtggggtggagctcagtgccgaggggcagcgcctggccgcgacggtgggtgaggcctacggcagcatcgatgccgaattgcagcggttggacgcgggcatgatcagcggcaccctgcgcctgcgctcgatcccgtcgtttctcggcaagtggctgaccccgcgtctgccgcgcctgcagcagcgctttccggatattcagctgcgcatggtcgccgaggacagcagcatcgccctgcacgagggcgacttcgacctggccatcgacttgaatgacggcagttaccccggcctgttatccacagccttgctcgacgagcagattttcccggtgtgcgcgccgagcctgctgcgcggtcgcccaccgttgcatggtccggccgacctggtgcatttcccgctgctgcatgacatcaccgcctggcgtgggagctatgagtatgcggagtgggagttttacctgaatgccatcggctaccacgacgccgatgtgcgccgtggccataccttcaaccgtaaccacctgaccattgaggccgccatcgccggcatgggcgtggccatcgcacggcgtacgttgcttaatgatgagttggagcgcggcaccctgatcgtgcccttcggcctggctgtgcctaaccataaacgctacgtgttgctgtatgcgccgggtgcgctgagccatccgggtgtgcgtgcggtgcatgattggctggtggaagaagcggagatctttcgcggattgcacccgttgggagaggggcaattgtgaggttagctgtgcgtaagaagatgtaactaactccccaccctaacagcgtttttgctcgtagtcagacttaatttgtaatgtgggatttatctttgcaaaggggttgaattgttctgcggactgctcaattgtgtaatcaagaggtcatggtttcaccaccccggtgtcgcagttgtgacctctcgcgagctagctgaaataagggaagaactatgcaaatccaagtcaatagcgataaccatattgaaagcagcatccgactggaggagtgggtacgtactaccattgagagcacgctcgaacgctacgaagaagacctgacccgagtggaggtctacctgcgggatgagaacggcgacaagcccggtccccacgatttgagttgccgcctggaagcgcggccaaaaggccatcagccgctgtcggtgctgcacaaggccgataccctggaacaggcgatcgacggtgcggcgaccaagctggaccatgcgttggaacatctgtttggcaaactgcaaggcaagccgcgcgctgccgggaaaagccagccgaccaccaaagtcaatgaagatgagctagagcaggagtttctggaaaaagaacgtgccgtgttcaacggctgataactttctcacgctccactaagaacgggcctgcatttgcaggcccgttttcatttactgcccgcgtcggaaaaagtaccggctcgatagcgccagcccacaggcacccaaccctgcaaacagcatcgcccagccggcaccatgacgcagtgcggcctgggcctgcgcgacgctcacccccggtacatcgagcttacccgccgcgatgttctggctgatgcccggccaatccagcgccgtggcgcccggcagcacattggccagttgagcgctgatccccagcaacagcaccaaccccatcaacgcgatgttgagcgccagggtaatcagccgtgcgctcaggtcgatgcccgaggccatgccggcgcggtccgccgacaccgagcccgtggtggtgttggtggtgggggagttggtcagtgccaggcccacgccggcaatgatgcaactggccaggatcagcaggatgctgggttgcgccgcccgattggcggcggccatggccaggaaacccgcacccatcaaacccaggcccaacgggatgatgcgctcggcgccgtagcgcagggccaggcgctccgccagcggcggcaccagcagcgtgggcagggtgtaggcgagcagggcgccgccgctggtcagcgtgtcgtagcccaggcccgcctggaaatacagcggcaggtagatcatgaacggccagaagctgaagttcatgccaatggaacccatcaaggcgccattgaagcgctggatgcggaacaccgagaagtcgaacatcgggtgggcgctgcgtcgctcaacgacgatgaacagcagcaacccggccaccgccagcccagcccaaccgagcatgatcggtgtgccaaaaccgttctcggtgccctgggtgatgaaatagaccagcgcgaacactgacagcgtcaaggtgagcataccggcgatgtccaggcggtggctggccgggtcgcgggattcctgcacgctcacgtgcagcagcaccagggtgaacacggtgagcggcacatgcaccaggaacacccagcgccagtccgctaccgccaggatcaatgcgcccaccatcggcccgaagcccaggcccacgccagcgatcacgccccagatcgcgaacgcccgtgcccgcgccgccggttcgcgaaacaggtgcgacagaatcgcgaactggcaaatcatcatcgccccggcgcccacgccctggacgaagcgtgcggcaatcagcgtcggtgcatcgtttgccagcccgcacgccagcgaagccagcccgaacaaccacaggcacagcaccagcatgcgcttgcgaccaaagcggtcggccagggtgccggcggccatcaacacgctggtgcaggccagggtgtaggcattcatgatccattgggcatcctggaaacccgtgcccagttgctgttccagtgtgggcaggatcaccggcacgctggagatctccaggccgaacatcagggcgacgagacacacggcggtgagggcgaggccgtttctggcggagcggggtgggttggcggccgataacgtggcggcgggttgcatgggattctcctgaggttgagggaccgttggattttcaggggaatctgtttctttattcgtgataagttttccgtcaataagggaatcaagagcgacaattaaatcatggccactgcgcgtttcgatggcgttgaactctttttgcagatcgtcgaaagcggcaacctgacggaagccgccgaacgcctgaacctcacgcgctcggcggtgggcaagggcctggcacggctggaagcgcggctggggacttgcctgttgcagcgctccactcgccgtcagcgtctgacggaagacggacaggcgtactacgagcattgcctgcgcgcattggctgaacttgaagccgccgaatcggtgctggaaagcggccggcagcagccacgcggtcgtctgcgcgccagcgtgccgctggccttcgggcaccactatgcggcgcccgcgttgtgggggttgatggaccgttatccggaactggagatcgaggtgtgtttcgctgatcgcatgaccgacctggtgcaggaaggctttgatatcgccgtgcgaatcggccctttgcccgacaccgaccgcttgagtgcacggcgcctgggtgaacagtccgttggactggctgcttcacctgcgtacttgcagcgggtggggcggattgaatcggccgacgaccttgccggccatcgcggcattgcctaccgcagcaacacgccgcaccgttcgcgggttgtgtcgccattggtgctggacgatctccaggccgtggcggacgctgctatcgcgggcgtcggcctggcctggttgcccagttggttgattgcacactatgtgctgcgagggcagttggaagcagtgctacccgcctaccgtgagcaaccctcgccaatccacgtgatctggccaaccgccgcgcatatgccggccaaaacccgctgcgccatcgacgccttggtcgcagctacccccagttgcctggcgggcagttagaagcagacggtgggggatgagcagtgtccattgtggcgagcccgctcgccacaacaaatctgctcaccacagggagtgcttctcgcgcagttagaacgcgatcgaggtctgcacgtacaccgtgcgcggttcgccgacgtacttgcccttgttgttgtcgtcgaacgagcgcgtgtagtactgcttgttgaagatgtttttcacccccaccgccacattcaaatccgacagctgcgggccgaagtcatacgcggcgcggctgctgaacagcatgtagccggggatgcggccattcgcgccgtcggcgctttcggcctgggtgttggcattgtcggcgaactggctgctctggtagctgctgtccaggttgagcttccagcgaccctcggtgtaacccacgcccagggtgcctttgtgcttggacgagaagggcacgcggttgcctttgttcgggccgtcctcgcggatggtggcgtcgacataagcgtaggtggcgtacacatcaaacccggccagtgcagggctcaagccatcgagcgcgtagttgacgctggtctcgataccctggtgacgggtttcgccacgggcgatcaccgagtcgttggtctggttgctttcgtactggttgtcgaagttgatcaggaacgcgccgatttccgcacgcaaggtgccgtcgtcgtagcgggtgcccagttcccaggtacgggctttttccggcttcacttcgccgctggtcacgcggttgggcatctggctgtactgcacgctgccgaacgaaccttcggtgttggcgtagaggttccagttgtcggtgaggtggtaaagcacgttcagtgcgggcaacgcggtgttgtagtcgcctttgtacttgacgtgggtgaggttgttggtttgctgggactcgatcatctcgtagcgcacgcccggggtgatggtccacttgccgatatcaatccggtcgtcgatgaaaaatgcgttggcttcggtgccgccacgggtgtcgcggtcgttgcggctgttggtggtggggatctgctggttggcggcaatcggcgtgcggtagcgcagttcgtggccggcttcgttgatgtagcggtagcccacgcccacttcgtggctggtcgggcccaggtcgaagccttgggcgaagcgggtttccaggccgcgtacccagtactcgcgtggggatagcgagaggaaggtgccctggtccaggtaaccgctgcgcagggtcttggtgaagaagctgtttacggtgaactcgcgacggtcctgctcatagcggtagccgacgttgaacatcgtacggcggccccagaacttgtcgtaggggcgggtggactggtacggatcggccttgtagtccgcaacgttcaacccccctggcatatcggcctggccttcgtagtactgcgccatggcgttgaagctgttggcgtcgtcgagctggtatttgcccttgaggatcaggtcgtcgatgcgcgtgttgctgttctcgcgccagtcgccgccacgggtgccggagtacagcagcgcaccgccaaggccgttgtcggccgtgccgccggccagcaggttgccggtggtcttgaagccgtcatggctggaggaggggctggtttcggtctgcaggccgcctttgacggtaggcgcatccggaatcgcgcgggtcacgaagttgaccacgcccccgacgttctgcgggccgtagcgcacggcgccgccgccacgcaccacgtcgacggcatccatgttgcccatgctgatcggcgcgaacgacagttggggttggccgtacggcgcaaacggcaccgggataccgtccatcagtacggtggaacgcgaggccaggcgcgggttgaggccgcgaatgccgaagttcagcgccatgtcgtggctaccggtgccgttgttgtccggggcgttgacgccggggatgcgattgagcacgtccttggcctgggtggcgccttggcgttcgaacgcttcgcggcggatcacatctcgggcgccggggtgttcgaacacgttggtctgtgctgcgtcgccgagccagtcgccgaccacgctggaggtgcccaactcgatagttgccggtgcactggccggttgcaggctgtaggcgttgtcgccttcggcgcgggcttgcaggccggtgccttccagcagtttctgcaggccgtctgcggcgccatagttacccgacaaaccacggctctgcatacctgcggtgacttgcgagccgaaggaaatcagcacacccgcttcacgtccaaattgattcaacgccgcttccagcgaagtcggcgcgatgtgatacggcttggcatcagccgccatggcgtgtggcagtaccgtaagactcaggctggcgccaagtaggagttggcgcagggtgcgggcgagaagcgtcggttgctggggcatgaagagcggtccttagaaggaaggatcaagggggctttccttctctgtcacgcgaggtgtgcaaaacggctcacagtgtttgaaattaatttcaggcgcgtgcctgtaccgtcacccaataccgcgtgaagcgccgtactttcaccggcaggctcacttccagcaggtccagaatgcgttcactgtcgtccagcgggtagctgccggagatcaacaggttggccacctgcgggtcgcaattgagctggccacgacgataacggccgagttcgccgaggaaatcttccaggcgcatgtgggcggcgaccagcatgccgtcggcccaggcaccgctgttggcgtcggtagggcgcggggtatcccagcctttgcgggtgaagttgacctggcgcgcggcctcgaccgtcagcggcaggccgctgtaggtgttgggcattacctcgacgcggccatcgaataccgccagctgggtgtggtcgttgaactggcgcacgttcatgcgtgccgcgtggctggtaagtagaccctggccggtcaacacgttaagcggtgtgttgccggcgaaaccggtcagcaggatttcgccttcaagcaggcggatcagtcgttgctggccatcgaagtgcacatccactgcgctgccggtattgagctgcaactggctgccatcggccaattgcaccttgcgccgctggccgatggggctgcggtaatcggcggtcagcggcggcaggatatgttgctggcgcaggccccaggcggcggccgaaccggcaccgaggatcaacagcaacttgagcgcttggcggcggctggtggaggttggcgcgttcaacgccgcgtgggccagcggcgagggcatgccgcgcaggcgctggttgacgcgttgcatatggtcccaggcgcgctggtgttcgctgtgggcgttcagccagtgttgccaagcggcctgctggcgtgggttgaggccgccttgctgcatttccatcagccaatgcacggcctgttcggcgacttgagtggagaaggtcatagggcgaaatagcagcgcatggccgctttggtcaggtgacgcttgacggtggcgatggaaatccccaactcagcgccgatttgcgcgtaggtcaggccatccagctgggccagcaggaaggcgcgcttgacctgcacgggcaggccatcgagcagttggtccagctcgaccagggtttgcaggatgattgcgcgttcttcttcggatggcgccacgtgttcgggcatgtgtgccagggcatcgaggtaggcgcgttccaggtcctggcggcggtagaagttgaacagcacgcgcttggcaaccgtggtgagaaacgcacggggctcgaccagcgtgggggtttcccgcgcggtgagcacgcgcatgaaggtgtcctgggcaaggtcagcggcgctttccgggcagccgagcttgcgtcgcaaccagccggtgagccagtggtgatggtcggtgtacaaaacttcgacggtgttggacgggctcaacggggacactccacaagcatcgccatgctttagagaacaagaattgttcgcattgtagggtccgtgaagggcttcggcaatccatccgcgcaggtgattcatccgttctgttttgcttatgagaatatttatcattaatattgcgcgctgatgaacctggcgcctcccgcatgaaaagcaaaacctcgctgcctgtctcctatcgtctcgccgtgacttcgcgcgtgttggctgccgtggtgggcggttacctgatggcgtccctggccagtatctgcctggcgctgtggctgcccacctcccgcgccgatgcggtgatcaccgggatgatgagttccttcgtgttctacctgctggcagtcatctggtgtttcgcctgccgcagcgccgcacgtgcctggttcggcgtgatgctgccaagtgccgcgtttgctaccttggcgggcgtgggcttgtggatgacacgggtatgaaagagggtttccgtcaggcgatggcctggttgcacacctgggccgggctgatctttggctggctgctgtttgcgattttcctgacaggcaccctgtcgtatttcaaggacgagatcagccactggatgcagcccgaagtgcaggcccgtcccctggacgatgcacgcagcctcaccgtcgcccaaacctatctgcagcaggtcgcacccaccgccgctcgctggttcattaccttgccggatagccgcgatcccggcctgtcggtgatgtggcaggacaaagtcgaccccggcaagcgtggcaacttcatccagaaaaccctcgaccccgtcaccggccaggccgtgcaggcccgtgaaagcatgggcggcgagttcttctatcgtttccatttccagctgcaaatgccttacccgtggggccgctggctgtcgaccatcgccgcgatggtgatgttcatcgcgctgatcaccggcatcatcacccacaagaaaatcttcaaggacttcttcaccttccgcccccgcaaaggccagcgttcctggctcgacgggcacaacgcggtgggtgtgctggtgctgcccttccatctgatgatcacctacagcagcctggtgatcttcatgagcatggtgatgccggcgccgatcctggcttcctacggcaacgaaacccgcgcctttttcagcgaggtgttcccgaataccaacaacgcccctgcattgggccagccagccacattgctgccgctggtaccgatgtacgagcaggcgcgggcgcagtgggcgggtgggcatgtggggcgtgtggcggtgaataaccccagcgatgtgaacgcctcggtcaatgtgttccgcgcaggttccgacagcgtggtgcacgatttcggcagtaccgtgtccttcaatggcagcaccggtgaactgttgcgagtgagtggcgggcagtcgctgccggctgccatcggcggcagtttctatggcctgcacatgggccatttcgccggcccggtgctgcgctggttgtactttatctgtgggttggcgggcacggcgatgatcggcaccgggctggtcatctggcttggcaagcgccagctcaagcacgccaaggccggcgtgatgccctttgagttgcgactggtggaagtgctcaacattgccagcatgtccgggctgatgatcgctatcgcggcgttcttctgggccaaccgcctgctgccggtgagcttcgccgagcgttccgactgggaagtgcagaccttctttattgcctggggcctgagcctgcttcacgccatcctgcggcgtggccgccagggctgggtcgagcagttgagcgtcggcgcattgctgtttattgccattccattgctcaacgcgttgaccacctcgcatcacctgggcgtttcattggccaccggcgactgggccatggccggcttcgacctgacgtgcctggccagcggcgtgttcctcggctgggcagcctggaagatgcagcaccgcaccgtgcctgcgcccaaggccgaacgtgcacgcgggttgacgctcaagcaggaggcgaactgaatgctactggcgctgctgatgtgctacgtcgggttcaccgcattgtgcttatccaccgaccgtcatcacggtgagttgctgcacagcaaactctcgtcccgtcggcgtacggggttgcgtgtggccgggtggttgctgctgaccgtgtcgatctggcccgccgtggccatcgccggttggggccagggcctggtggagtggtgcgccgtgttgatgctcagcgcattgctgctggtgttgctgttgccatataggccaaggctggccttgatcctggcgggtgtcggcctgctcgccagccctgttgcagccttcgccaccctctgagcccacccatgatgatcagcaccccacccgaaccccaggacagccagcacgctgacgcggccggtgggcgtgcgcatttcctgcaggtgttcctgtcccagcgttcgcagatggaggccctggtgagtcgccgcgtggggtgccgcgcgacggcggcggacctggtgcaggacctgttcctgcgcttctggcgccggccgctggtgcaggtcgaagaactcagtacctacctgttgcgctgcgccggcaatatcgccatcgatcacttgcgcagcgaaggcgcgcgagtgcgcagcaacgaaggctggctgcccgaacagcaggacaaccaaggctccgagccccaggcggcgctggaagctggcaatgatctgcgccatgtcgaagcggccctgcgcagcttgcccgagcgcacgcggcagattttcctgctcaaccgcatccacggccgcaagtacgcagaaatcgccaaggccatgggcctgtcccaaagtgccgtggaaaaacatatgatgcgtgccctcgaagcctgtaaagccagccttcgcgacccctcatccccacgcacgccagggaaagcaccgtgaacgtcacccccacgcccgcccaggaacacgccgcactggcctggctgagcctgttgcatgaccagccgagcagcggtgaccaggccacgttcagccgctggctgcgggccgatcctgcgcatgtcgaggcgtatgcccaggcccaggtgctgtgggagttgagcgaagttccggcgcgaaggctggcggacgaagaagccatggccttgcagggctacctcaatgcgatgaacacctcgaagcgttcgcgggtggtgcgttggtccggggcgttggccatggctgcgtgcctgttggtgatggtgtccatgggcgccggctggcagccgtcgcggtgggtcgatgactttggtgcggactacgtgacggcgcccggggaaatcaaaaccgtcacgctggctgacaaatcccaggtcaccctggacgctgacagcgccatcgctgtggatttcaaccatggtgagcggcatatccagttgcgtcgcggcgccggttttttcagcgtgacccataccggtgagtcgttcgtggtggaggcgggcagcggtgaagcgcgggtgctgggtactcagttcgaagtgcgcctgcaaccggcaggcgcccaggtaacggtgttgtccgggcgggttggcgtgacgccgtcaaagcaggggcaacagcagattcttaccgccggccagcaagtggcctatgccgatggcaatgccgaaccgatgcatggggtcgacagcgaatcacgcctggcctggcgcgacggctggctcaactactacaaggcgccgctggcggacgtggtgaaggacctgggccgttactaccccggtcgcatcctgttgctcaacgacgagatgggcgccaaacgcgtcagcggcagcttcccgagcaaggacccactggcggtgctgaatgcgttgcaggcggtgctggggtttgaacagcaccacgtgctggggcgcatgatcgtggtgcgctgattacttcagcgctgccatgatcttctccgggctgtactcgcgaatcagcgagccgttcacgtccacaaacggaatcccaccaccgcccaacgcctcatacgccttgcgcgcctgggcgtccttctcgatatcgaacgcctggtaagggatgcctttctggtccaggaaacggcggatctgcttgcagtacccgcaccactcggtggcgtagagcgccacgcgcgccttcgcccgcgtctgctctggcaccacctgcgatgggttgaacacccgctcgatcttgccccagttctggatcaccaccaccaccagcaataccagcaggactttcttgaagaccccgccgagcatcagttacggcgcttgagctggtcggtcagttgggtcggcaggcccttgatgatcaaggtgccggcggcttcgtcgtactcgatcttgtcgcccagcaggtgtgcttcaaagctgatggacaggccctcggcgcggccggtgaagcggcggaactggttgagggtgcgtttatccgccgggatctccggtgacaggccgtagtccttgttgcggatatggtcgtagaacgcctttggccgatcttcatcgatcagccccgagagttcttccaggcccatgggttcgccaagcttggcctggctgctggcgtagtccaccagggtcttggttttttcgcgggcggattcgtccggcaggtcttcgctctccacgaagtcactgaacgccttgagcaaggtgcgggtttcgcccgggccgtcgacgccttcctggcagccgatgaagtcgcggaagtattccgacaccttcttgccgttcttgcccttgataaacgaaatgtactgcttggactgcttgttgttctgccactcggacacgttgatccgcgccgccaggtgcagttggcccaggtccaggtgacgggacggggtcacgtccagctcgtcggtcaccgccacgccttcgctgtggtgcagcagggcgatggccaggtagtcggtcatgccctgttggtagtgggcgaacagcacatgcccgccggtggaaaggttggactcttccatcagcttctgcaggtgctcgaccgccgtgcggctgaaggtggtgaaatcctgcccgccgtcgaaatactccttcaaccagccgctgaacgggtgcgcgcccgactcggcatggaagaaaccccaggccttgccttgtttggcgttgtagctctcgttgaggtcggcaagcatgttctcgatggcggccgactcggcaagctcggagtcgcgggcatggagaactgcgggtgtgccgtcgggttttttgtcgatcaggtggacgatgcaatgacggatcggcataggcttctcggctggttgagaggggagcggtgggcctccccgaaaagtcgccaagtgtaccgcaccattggccaagacgtgcttcgaagggtgttttgggcagcttccgacggggcatatgcctttttttcacggtttagagcgataaagctgaccaaatgggtaggtagaggcggatatttccccgtctctgtgctagttttgccccgtcttacgccaagtctcggcgataagcgtgcattcagcatctgtcaggtcgaaccaatccccgtttcaagcatctataaccccgatctccgtggttataagcctggggtgccagaccatgacggtcgggctcgacggctgacactgcactctgcaatccatatgaatttgatagggaaggaacaccacaatggctattactaaagaccaactgatcgctgacctggctgaagcagtagacgcaccgaaaactaccgtgcgcgctctgctggaccaactgagccatgttgttgctgaccagctggaaaacggcggcgaaatcactctgccaggcgttggcaaactgaaagtgaccgagcgtcctgcccgtactggccgtaacccttcgactggcgctgccatcgaaatcgctgccaagaaagttatcaagctggttgtggccaaaggcctgaccgacgctgttaacaagtaagacgcagcaaaaaaaaccgtgcttcggagcgatccgggcacggttttttgttgcctgcgatttgtgtctagcgcacccagcgctggcgccagatctgttgctcgttcttgctctggaaggtccaggctacaaagcggctctgcttctgcccctgggacatttccaccacctggctttccagcacgccggcttttttcagggctgtctcgatcgcgggcaagttcgacgcttttgacaccaggcaactgaaccacaacaccttgtgggcaaaatgcgcactttcagcgatcagttgcgtcacaaagcgcgcttcgccaccttcacaccacagttcagccgattggccaccaaagttcagcaccggcaacttgcgcttgggatcggccttgcccagggcgcgccatttgcgttcgctgcccttggtcgcttcgtccatggacgcatggaacggcgggttgcacatcgtcaggtcgaagcgctcacccggctccagcaagcctagcaggatctgcttggggttggtttgctggcgcaactggatgaccttgctcaggtcgttggactgcacgatggccttggctgcggccactgcgatagggtcgacctcggagccgaggaagttccagcggtattccatgtagccaatcagcgggtagacgcagttggcgcccatgccgatgtccagcaccttgacgatcgaaccgcgcgggatcttgccgtcattggtgctggccagcaggtcggcgaggaagtgtacgtagtccgcacgccccggcactggtgggcacaggtagtcggccggaatgtcccagtgctggatgccgtagaaggctttgagcagcgcacggttgaacacgcgcaccgcatccgggctggcgaagtcgatactttccttgccgtacgggttgatgatcacgaattgcgccagttccggcgtggtcttgatcagcgccgggaagtcgtagcggcctgtgtggcggttgcgcggatgcagggtggcctctttgcgcggcacaacgggcttggccgtggctgcggttttaggcttcttgcgcggaggttttggcgtgctgggggcggtcatgatgattctggtgttggctcaaagtggtgggcattgtcacacatcctgagcctgtcccggtcaaatgtgggagggtgcttgcccccgatggcggtgtnnnnnnnnnnnnnnnnnnnnnnnnnacaccgccatcgggggcaagcaccctcccacattggccgcgtgtacaggcgtttcagacaaaaaaagagacccgaaggtctctttttctacacgactcacaccttacaggctggaaatccgcgcatgttgctccgccagcttgcccagggcctgttcggcctcggccagcttggcgcgttccttctcgatcacttcagccggcgctttgtcgacgaacgccgcgttggacagcttgccgcccacccgctgcacttcgccttgcaggcgtgcgatttccttgtcgagacgggccagttcggcacccttgtcgatcaggccggccatcggcaccagcacttccatctcgccaaccagtgcggtcgcggacagcggtgcttcttcgccggttgccaatacggtgatcgactccagcttcgccagcttcttgagcagcgcatcgttctcggcgagacgacgcagatcctcggcgctggcgttcttcacaaacaccgccaatggcttgcccggcccgatgttcatctcggcacggatgttacgcgtacccatcatcagggtcttgagccattcgatatcgctttcggccgcttcatcgatgcgcgcttcgttggccaccggccaaggttgcagcatgatggtcttgccttcgataccggccagtggcgccaggcgctgccagatttcttcggtgatgaacggcatgaacgggtgggccaggcgcaacgccacttcgagtacgcgcaccagggtgcgacgggtgccgcgctgacgttcgatcggtgcgttctcgtcccacaggaccggcttggagagttccaggtaccagtcgcaatactggttccagatgaactcgtacagggcctgtgcggccaggtcgaaacggaactggtcgagctggcgggtcacttcggcttcggtgcgttgcagttgcgagatgatccagcggtcggccaggctcagttcgacggcttcgccgttctgaccacagtcttcgcctttatccagcacgtagcgcgccgcgttccagatcttgttgcagaagttgcgatagccttcgacgcggcccatgtcgaacttgatgtcgcgaccggtagacgccagcgagcagaaggtgaaacgcagggcgtcggtgccgtagctggcgatgccatcggcgaactcgtcgcgggtctgcttctcgatcttcttcgccagtttcggctgcatcaggcccgaggtgcgtttctgcaccagggtttccaggtcgatgccatcgatgatgtccagtgggtccaggacgttacccttggacttggacatcttctggccctggccgtcacgcaccaggccgtgcacgtacacggtcttgaacggtacctgcggggtgccgtcctcgttcttcaccaggtgcatggtcagcatgatcatccgggcaacccagaagaaaatgatgtcgaagccggtgaccagtacgtcggtggagtggaatttcttcaggaattcggtctgttgcggccaacccagggtggagaaggtccacaggcccgagctgaaccaagtgtccagtacgtcgttgtcctgttgcagcgcaacgtcggggcccaggttgtgcttggcgcgcacttcggcctcgtcacggcctacatagaccttgcccgactcgtcataccaggccgggatgcggtggccccaccagagttgacggctgatgcaccagtcctggatatcgcgcatccacgagaagtacatgttttcgtactgcttgggcacgaactggatgcggccgtcttccacagcggcaatcgccggttctgccagcggcttggtggacacgtaccactggtcggtcagccacggctcgatcacagtgccggagcgatcgcccttcggcactttcaggccgtggtcgtcaacgctcaccaacaggccggcggcgtcgaaggcagcaacgatctgcttgcgcgcttcaaaacggtcgaggccggcgtattcagccgggatcttgccgtcgatgctctcgttcagtgtgccgtccaggttgaacacctggcaggccggcagaacggcggcgttcttgtcgaagatattcagcagcggcaggttatggcgcttgccgacttcgtagtcgttgaaatcgtgggccggggtgattttcacgcaaccggtgccgaattcagggtcgcagtagtcgtccgcgatgatcgggatacggcggccaaccagcggcagttcgacaaacttgccgatcagcgccaggtagcgttcatcgttcgggttaaccgccacggcggcgtcgccgagcatggtttccggacgcgtggtggcgacgatcaggtagtcgttgccttcagcggtcttggcgccgtcggccagcgggtacttgaggttccacaggaagcctttctcgtcgtggttttccacttcaaggtcggaaatcgccgtgtgcaacttggtgtcccagttgaccaggcgcttgccgcggtagatcaagccgtcttcatgcaggcgcacgaaggcttctttcacagattccgacaggccgtcgtccatggtgaagcgctcgcggctccagtctacggacgagccgagacgacggatctgacggctgatattgccgccggactgatccttccattcccagatcttttccaggaatttctcgcggcccaggtcgtgacggttctggccggtggcttcgagttggcgttccaccagcatctgggtggcgataccggcgtggtcggtgcctggctgccacagggtgttgcggccctgcatgcggcggaaacggatcagtgcatccatgatcgcattgttgaagccatggcccatgtgcaggctgccagtgacgttcggtggcggaatcatgatggtgtaggaatcgcccgcgccttgcggggcgaaataattctcggattcccaggtgttgtaccaggaagtttcgatggcgtgcggctggtaggtcttatccatgcgcggcgggaccctagttggcatttattcaggaaagccggcaagtataacggggctgggagctgagggcgagttgaagacttgtgcaaatcaaaggtgggaggcttgtcccctcccacaggaagtttatgcaaggctcaggactggtattggctgagcagccgctccatccgcgcatccagccggcgcttgatctcggtttcgatatgcggggcgaagtcgtcgatcacgtcctgcatgatcagttgtgcggcggcgcgcagttcgttgtccaggtgcagtagcagggcgtcgggccctttttcagcgggggcaggttcgacggagggagcttcgacaaccggctccggcgcgacaggtttgccgccgaccatgtcgaacagcagcggaatctgtacctcgccatcgaccgtctcggtcaacagcggcggttgcaagtcatcatcacccagtaactgacggatcgactccaggtcgtccagcaggtggtcgtcttttttctgcgggtttggcgtgtccatcatttactcaaagtcgttgtagccggtgatcctggagaggatagccctgttcgcggtagaaacggaaactctcccgcgcggcctgacgaatagccggatcttccaccaccacctctgccacacgggcaaaagccttggcgaatggcggtactttcaggtccaggttgaccagcaggtcatggtgatcgccgcaactgtcacccaaacccagcaccaccaggccttcaggttcagactcggcggggccgtggggtacgaagctttcgcccttgaagcgccacaggcgggcatccagctcatcgcgttgggcggcatcgctgcaatgcaggtagatgcggtggcccatgcgccaggctttttcggtgagtttgcaggcaaagtccaggcgcgcgagcggatcggcgctgggcaatatatagaagtcgacttgggtcattgcggttcctgagaccgaggcgacgtaagagtcgcctcggaatcttcagtttcaggccttggcgcgatccagcaggtactgggtcaacaatggcaccggacggccagtggcgcccttgtccttgccgccgctggtccaggccgtgccggcgatgtccaggtgcgcccagttgaagttcttggcaaagcgcgacaggaagcaggccgcagtgatggtgccggcttttggaccaccgatgttggcgatgtcggcgaacgggctgtccagctgttcctggtactcatcgaacagcggcagttgccaggcgcggtcgtcggcggctttaccggcgctgagcagttgctcgatcagctcgtcgctgttacccagcaggccggaagtgtgggagcccagggcgacgatgcatgcgccggtcagggtggcgatgtcgatcacggcctgtggcttgaagcgctcggcgtaggtcagggcatcgcacagcaccaggcggccttcggcgtcggtgttgaggatttcgacggtctggccgctgagggtggtgacgatgtcacccggacgggtcgcgccgccgctcggcatgttctcggcacaggccaggatgcacaccaggttgatcggcagcttgagttccagcacggcacgcagggtgccgaacacgctggcggcgccgcccatgtcgtacttcatctcgtccatgcccaggcccggcttgaggctgatgccgccggtgtcgaaggtgatgcctttacccaccagggcgtaaggcttctcggacttcttgccgccgttgtattgcatcacgatcaggcgtggcggctggtcgctgccttggcccacggcatagaacgagcccatgcccagttccttgatcttcttctcgtccagcacttcgactttcaggcccttgaactccttgcccagcgccttggcctgttcgccgaggaacgtcgggtggcagatgttcggcggcaggttgcccaggtcacgggtgaacgacatgccgttggcgattgcagtcgcgtgggtcacggcgcgctcgacttcagcctgggcggccttgatggtcagcagggtgattttcttcagggcacgcggttcggccttggtgctcttgaactggtcgaagatatagccgccgtccaccaggctttcggccagcaggcgggtcttgccgtagctgtcacggcctttgaccacgatttcatcgagggccagtgcggcatcagtgccacccaggcccttgagggtgttgaggatgccgctgatgatcttgcggaacgggcggtcgcccagctcggcatccttgcccacgcctaccagcaatacgcggtcggccttgaggttgggcaggctttgcagcagcaggctctggccgactttgccggccaggtcgccgcgcttgagcactgcgctgatagcgccgccgctgagttcgtcgagttgcttggcggccacgccgagcttgcggccttcgccgatggcgaccacgagggtggcggttttcaacgtttcggggctaacgctttttacaaccagttccattttcgggtcccttataaaggtcggttagccaggagtctgtactccggctttaataccaggcagctgtgtaaaccgccggcgacaaaggccgcagtttgaacctcgccgacggagcctgacaacccttggtgcacgctttgtgcgtgtgcacgagcaagctccgtgacaggcgcggtcaatcacaggataatgcgccatctttttagccggccctgtataaacgggctgtctcggtatgcttgcttgtttggccgccttagcctgacaaccctggagtgtctggtttgattgtcttccgttatctgtcccgcgaagtcctgttgaccctgagtgccgtgagtgcggtgctgctggtcatcatcatgagtggtcgtttcgtcaaatacctggcccaggctgcctccggcgccctggacccgggctcgctgttcctgatcatgggcttccgcctgccgggcttcttgcagttgatcttgccgttgggcctgttcctcgggatcctgctggcctatggccgcttgtacctcgaaagcgaaatgaccgtgctctcggccaccggcatgagccagcagcgcctgctgggcatgacgatgatcccggccgccggcatcgcgctgatcgtggcctggctgagcctgggcctggcgccccagggcgccttgcagttccagttggtgctgaacaagcaggatgcgatgaccgagttcgacaccctcgagcccggtcgtttccaggcgctcaatgacggttcccgggtgacctacaccgaaaccctgaccgacgaccgcgccaacctgggcggtgtgttcatctccgagaaacgcctgggccaggacaagaaagaccggggcatttccgtgctggtggccgattcggggcgccaggaagtgcgtcctgatggcagtcgctacctgatcctggagaatggctaccgctatgacggcagcccgggcatggccgattaccgcgcgatcaagtacgacacctatggcgtgatgctggctcgcccggacatcagcgacgaagtcactgaccgtgatgccatcccgacgactgacctgtggggcagtaaggaactgcgctccgttgccgagctgcaatggcgactctccctgccgctgctggtgttcatcgtgaccttgatggccgtgccgctgtcgcgcgtcaacccgcgtcagggccgattcctcaagctgttgccggcgatcctgctgtacatggcttacctgaccatcctgatttccgcccgcggctccctggagaagggcaagctgtcgccgaccctgggcctgtggtgggtgcacgggatcttcctggtgatcggcctggggctgctctactgggaaccgatccgtttgaaaatgatgagccgtcgcggccagaaggagttggctcgtggctaagctcgatcgctacattggtagcagcgtactgatcgccatcctggcggtattgggcatcatcctcgggctggcgtcgttgttcgccttcatcgatgaagtgggcaacgtcagcgacacctacaccgtgtgggacgtgctgagctatgtggccctcaccgcgccgcgtcgcctctacgacatgatgccgatggccgcgctgatcggctgcctgatcggcctgggcagtctggccagcaacagcgaactgaccatcatgcgcgccgccggcgtgtccatcggtcgtatcgtctgggcggtgatgaagcccatgctgctgctgatggcctgcagcgtgctgatcggcgaatacgtcgcgccaccggccgaaaccactgcccaggccaatcgcgccctggcccaggggtcgggcgatgcgcaaagctccaagcatggcctgtggcaccgccagggcgatgagttcatccatatcaacgcggtgcagcccggtggcctgttgattggcgtgacccgctacacgttcgacaaagaacgtcacctgctggaatccagcttcgccaaacgtgcgcagtacagtagcgaaaaatggcaactcagcgacgtcaccacgacctacttccgtaatgtcggccaaggcaccaaggccagcactgaagtgatcaacgtgccgagcgaggagtgggacatcgccctcaagccggaactgctcaataccgtggtgatgatcccggaaagcctgccgatctccgggttgtggggctatatccactatctgaaggaccagggcctgaacaacggccgctactggctggcgttctgggtcaaggtgttgcaaccggtggtgaccgccgcgttggtgctgatggcgatttccttcatctttggcccgctgcgttcggtgaccctgggccagcgcgtattcacgggggggctggtgggtttcaccttccgcatcgcccaggacctgctgggtccgtcgagcctggtgttcggcttctcgccgctgtttgcggtgctggtgcccacggccatctgcgccctggcgggcttctggttactgcgtcgggccggttgataccgcgcttatgatcaaaaaatgccctggtcgagagatcggggcatttttgttctggtcagcaaagatgacgtctggcctgagcatcaggtacaattcccggctatttttcagcgggcaatctgcctgcagcctttttgagtgttgatccgtgagtgatttgagtcatatccgcaatttctccatcatcgcccacattgaccatggcaagtcgacgctggccgaccggttcatccaaatgtgcggtggccttgccgagcgtgaaatggaagcccaggtcctggactccatggacctcgaacgcgagcgcggcatcaccatcaaggcccacagcgttaccctgtattacaaggccaaagacggtatcacctaccaactgaacttcattgacaccccgggccacgtcgacttcacctacgaagtcagccgttccctggcggcctgtgaaggtgccttgctggtggtggacgcaggccagggcgtggaagcgcagtcggttgccaactgctacaccgcgatcgagcagggcctggaagtcatgcccgtgctgaacaagatcgacctgccccaggccgagccagagcgcgtcaaggaagagatcgagaagatcatcggcatcgacgccaccgacgccgtcacctgcagcgccaagaccggcctgggtgtcgacgaagtgctcgaacgcctggtgcacaccatccccgcgccgaccggcaactacgaagatccgctgcaagcgttgatcatcgactcctggttcgacaactacctgggcgttgtctccctggtgcgcgtgcgtcatggccgtgtgaagaaaggcgacaagatcctggtcaaatccaccggcaagatccacctggtggacagcgtcggtgtattcaaccccaagcacaccgcgaccgttgatctgaaagccggtgaagtaggcttcatcatcgccggtatcaaggacattcacggtgcaccggtgggggacaccctgaccctgagctccacgccggatgtcgacgtgctgccgggcttcaagcgcatccagccgcaggtctacgccggtctgttcccggtcagctccgacgacttcgaagacttccgcgaagccctgcagaagctgaccctcaacgactcgtcgctgcagtacaccccggaaagctccgacgccctgggtttcggcttccgttgcgggttcctgggcatgctgcacatggaaatcatccaggagcgcctcgagcgcgaatacgacctggacctgatcaccaccgcgcccaccgttattttcgagttgttgctgaaaaccggtgaaacgatttacgtcgacaacccgtccaagctcccggatctgtcggccatcgaagacatgcgcgagcctatcgtgcgggccaatatcctggttccgcaggagcacttgggcaacgtcatcactttgtgtatcgaaaaacgtggcgtacagcgcgacatgctgttcctcggtacccaggtccaggtgacctacgatatgccgatgaacgaggtggtgctggacttcttcgaccgtctcaaatccaccagccgcggctatgcttcgctggattaccatttcgaccgttaccaatcggctaatctggtgaaactggatgtgttgatcaacggcgacaaggtcgatgccctggcactgatcgtgcacaaggacaacgcgcactacaaaggtcgccagttgaccgagaagatgaaagaactgattccgcgccagatgttcgacgtcgcgatccaggccgccattggcgggcagatcattgcacgaacctccgtcaaggcactcagaaagaacgtactggccaaatgctacggcggtgacgtaagccgtaagcgcaagctgcttgagaagcaaaaggccggtaaaaaacgcatgaagcaagtaggtaacgtggaagttccacaagaagccttccttgcggtgctcaggttggatagttaggtcctatgtcgctaaatttcccgctgttgctggtcatcgccgttgccgtttgcggtctcctggcgttgctcgatctggtgttcttcgccccgcgtcggcgggcggctatcgcggcctatcagggcagcgtcagccagcccgatggcgtggtgatcgagaagctgaacaaagagcctttgctggttgaatacggcaagtcgttcttcccggtgttgttcatcgtgctggtgctgcgttcgttcctggtagagccgtttcagatcccgtcggggtcgatgaaacctaccctggacgtgggcgacttcatcctggtgaacaaattttcctacgggatccgcctgccggtgatcgacaagaaggtcatcgaagtcggtgacccgcagcgcggcgatgtgatggtgttccgctacccgagcgacccgaacgtcaactacatcaagcgtgtggtaggcctgccgggcgacgtgattcgctacaccagtgacaagcgcctgttcatcaacggtgagtcggtggccgagaagctgctgggttccgagccgaacagcctgggcagcgccgagctgtaccaggaaaaactcggtgcggtagagcacgagatccgcaaggaaatgagccgctaccgtgcacagcctgacggccagtggaccgtgccggccgggcactacttcatgatgggcgacaaccgcgacaactccaatgacagccggtactgggatgaccccaacattcccaaggacctgctgggcatggttcccgaccagaatatcgtcggcaaggcctttgcggtctggatgagctggccggaacccaaactcagccacctgccgaacttctcgcgggtcgggctgatcaagtaatacaggcggcgctgtgaacacagcgccgaatgcttttctggggtggggacaaatcggtcctgcctcatgcagcaccaaccaggatttgaatttgaacactgcgtcaatcgtcgatggccgccggtgccaccaactagatatggataaaccgtgaccgtttctctagcacgtctcgagcgccagctcggctacaccttcaaggaccaggaattgatggtccttgccctcacacaccgcagctttgccgggcgcaacaacgagcgcctggaattcctcggtgatgccatcctcaacttcgtcgccggtgaggcgctgttcgagcgcttcccccaagcccgtgaaggtcagctgtcgcgcctgcgtgcgcgcctggtgaagggcgagaccctggccgtgctggcccgtggctttggcctgggcgagtacctgcgcctgggttccggcgagttgaagagcggcggtttccgtcgcgagtcgatcctggccgatgcccttgaagcgctgatcggtgcgatctacctcgatgccggtatggaagccgccaaggaacgcgtcaccgcctggctgacctccgagatcgagagcctcacgctggtcgacaccaataaagaccccaagacccgcctgcaggaatttttgcagtcccgcgggtgcgaactgccacgctacgaagtggtggatatccagggtgagccccattgccgcgtgttcttcgtggaatgtgaaatcaccttactgaacgaaaaaagccgaggtcagggtgtgagccgccgtattgccgaacaggtagcggccgccgcagcactgattgccctgggcgtggagaatggccatgactgattcaaccgcaacacgctgtggctatgttgccatcgtcggccgcccgaacgtgggcaagtccacgctgctcaaccacatcctcggccagaagctggcgatcacctcgcgcaagccgcagaccacccgccacaacatgctgggcatcaagaccgaaggcagcgtgcaagcggtgtacgtcgataccccgggcatgcacaagggtggcgagaaggcgcttaaccgctacatgaacaagaccgcttcggcggcgttgaaagacgtcgacgtggtgatcttcgtggtcgaccgcaccaagtggaccgacgaagaccagatggtcctcgaacgtgtgcagtacgtcaccggtccgttgatcgtcgcgctgaacaagaccgaccgtatcgaagacaaagccgagctgatgccgcacctgagctggctgcaggaacaactgccgaacgcccagatcatcccgatctcggcccagcacggccacaacctcgatgccctggagcgcgtgatcgccgagcacctgccggagaacgaacacttcttcccggaagaccagatcaccgaccgcagcagccgcttcctcgccgctgaactggtgcgcgagaaaatcatgcgccagatgggcgcggagctgccgtaccagatcaccgtggaaatcgaagagttcaagcagcagggcaagaccttgcacatccatgcgctgatcctcgtcgagcgtgacggccagaagaaaatcatcattggcgacaagggcgagcgcatcaagcgcatcggcaccgaggcgcgcaaggacatggaattgctgttcgattccaagatcatgctcaacctgtgggtgaaggtgaagggcggctggtccgatgacgagcgcgcactgcgctccctgggctatggcgacctgtaaggtcctgaatgcaccgcagggctgaaaatgtgggagggggcttgcccccgatagcggtgggtcagttgacaaataagtgactgacacactgccatcggggggcaagccccctcccacattaggtttgtgtcgttttcaaaagtgcattccagcagtgagcagccatgtcccaatccccaccccccagccaactcgcctacgtcctgcacagccgcgcctaccgcgagaccagcgccttggtggacttcctcacgccccagggccgcctgcgcgcagtcttgcgcagtgcgcggggcaaggcgggcacgctggcgcggccgttcgtggccctggacgtggagtttcgcggcaagggcgagctgaaaaacgtcggccgcatggaaagcgtgggcacctcggcctggctcaacggcgacgcgctgttcagcggcctctacctcaatgaactgctgatccgcctgctccccgccgaagacccgcacccggcagtcttcgatcactacgccgccacactgttggccctggccgaaggtcgtcccttggagccgctgctgcgtgcgttcgaatggcgcctgctcgatgacctgggctacggcttcgaactggtcaacgacctgcacggcgagcccatcgccgccgatggcatgtatcgcctgcaggtggacgccggcctcgagcgtgtgtatctgctgcaacccggcctgttccagggcaccgagctgctggccatgagcgaagcggactggacggcgcccggcgccttgtccgccgccaaacgcctgatgcgccaggccctggctgtgcatttgggcgggcgcccgctggtcagtcgcgagttgtttcgaaagccctgacaaccccgtgtatgctgtgcggcgtttctttcccttttcaggagcgcttccgtgaccaccagcaatcgcattcttcttggcgtcaacatcgaccacgtcgctaccctgcgccaggcccggggcacccgttaccctgacccggtcaaggctgcgctggacgccgaagaagcgggcgccgacggcatcaccgtgcacctgcgcgaagaccgccgccacatccaggagcgcgacgtgctgctgctcaaggatgtgctgcaaacccgcatgaacttcgaaatgggcgtcaccgaggaaatgatgcagttcgccgagcgcatccgcccggcgcacatctgcctggtgcccgaaacccgtcaggaactgaccaccgaaggtggcctcgacgtggccggccaggaagcgcggatcaaggccgccgtggagcgcctgtcgaagatcggcagtgaagtctcgctgttcatcgacgccgacgagcgccagattgaagcttcgcgccgtgtcggtgcaccggccatcgaactgcacaccggtcgttacgccgacgccaccacccctaccgaagtggctgacgaactgcaacgcatcatcgacggtgtgagttgcggcctcaaggaaggcctgatcgtcaacgccggccatggcctgcactaccacaacgtcgaagccgtggccgcgatcaagggcatcaatgagctgaacatcggccatgcgctggtggcccatgcgctgttcgtcggtttcaagggcgcggtggccgagatgaaagccctgatcctggccgccgccaagcactaaaaaatactgaagatccaatgtgggaggcggcttgccccttcccacatgcgaacccttactgtttagccgttgcaggtgtatcgtatctgccctttgcaggccttgggcctgcggccgatacgtgaggttgttgtgtcccgatccttttcccgtcgacaaatcctgggtggtcttgcaggcctggccgtagtgggcgtcggtgccggtggcgcctatcgctactggctggggaaagtcgccgaagccgaggctgggcatgattacgaactgatcgccgcgccgttggacgtggagttggtgccagggcacaagacccaagcctgggcattcggcccctcagcgccgggtaccgagttgcgggtgcgccagggcgaatggctgcgggtgcgtttcatcaaccacctgccggtcgccaccaccattcactggcacggtatccgcctgccgctggaaatggacggcgtgccctacgtctcacaattgccggtactgcccggcgaatacttcgactataaattccgcgtgcccgacgccggcagctactggtaccacccccacgtgaacagcagcgaagaactcggccgtggcctggtcggcccgttgatcatcgaagagcgcgaacccacaggttttaagcacgaacgcaccctcagcctgaaaagctggcatgtggatgaggagggcgctttcgtcgcgttcagtatcccgcgtgaggccgctcggggcggtacggcagggcgcttgtcgaccatcaacggcgtgtcccaggcggtgatcgatttgcccgccggtcagattacccgcgtgcggttgctcaacctcgacaacaccctgacctatcgcatcaacattccagacgttgaagcacagatctacgcgctggacggcaaccctatcgagccacgcccactgggcaaggaatactggctgggcccgggcatgcgcatctgcctggcgatcaaggcaccgccggcgggcgaggagctgtcgatccgcaacggcccggtacggctcggcaccttccgttcggtcgccagcaccgatgcgcccagcgaatggccgtctgcgttgcctgccaacccgatcagcgagccggacctggccaatgccgagaaactcaacttcaatttcgagtgggtgggttcggtctcggtcgacgccgacaacggcaagccacccagcctgtggcagatcaacggcaaggcctgggacatcaccgacaagacctgcgccgatcgtccgattgccaagctggagaagggcaagagctacattttcgaattgaagaacatgacccagtaccagcacccgatccacctgcacggcatgagcttcaaggtgatcgcctcgaaccgccacaaggtgatcccgtatttcaccgatacctacctgctgggcaagaacgagcgtgcccgcgtggcgttggtggcggataacccaggcgtctggatgttccactgccacgtgatcgaccacatggaaaccggcctgatggccgccatcgaggtggcgtgatgcgacagatccgccccaccgcgatcatcgaccgcagccgcgaccaggactttatgcgcgaagccctggccctcgccgcccaaggtgctgcgctgggtgaagtgcccgtcggcgcggtgctggtgcaggacggtgagatcatcggccgcggcttcaactgcccgatcagcggcaacgaccccagcgctcacgctgagatggtcgccatccgcgccgccgcgcaagccatcagcaattaccgcctggtgggcagcaccctttacgtgaccctggaaccgtgcagcatgtgcgcgggcctgatcgttcattcacgggttgcccgtgtggtgtatggcgcgctggagcccaaggcggggatcgtgcaaagccaggggcagttttttacccagggctttctgaatcatcgagtgttgtttgaaggcggggtgctggctgaggagtgcgggacggtcttgagcgagttcttcaaggcccgaagagccaagcccgctctctaaacgacactggagatccaaatgtgggaggggcttgcccccgatagccgtgtgtcagtaagcatatttatgactgatacaccgccatcgggggcaagccccctcccacatttctgatctccattcattcaaggagaccggaagttatttcctggcgacgatcaccgcccgcatcggcgccggcagtccttcgatagtcttgctgtggtcctcggggtcgaggaagtcactcagcgactggtacttcatccactccgtcccacgctgttcctcgacggtggtcacgctcacatccacgcagcgcacatcactaaagcctgcacggcgtagccatagcatcagcgccggcactgagggcaggaaccacacgttacgcatctgcgcgtagcgatcttccggcactagcacttgttgctgatcgccttcgaccaccaaggtttccaacaccagttcgccacccttgaccagggtgtctttcaacgccagcaaatgctcgatcggcgaacggcggtggtagaacacgcccatggaaaacaccgtgtcgaagccttccagattcgctggcaggtcttcgaacgggaacggcaggtgccaggcccttggctcggacaggtagcgctgcacagcctggaactggcagaaaaacagccaattcgggtccacgccgatcacgctgtcagcgccggcgccgagcatgcgccacatgtagtagccgttgccgcagccgacatcaagaatgcgcttgcccttcaggttcaggtgcggcgcaacccgcgaccatttccagtccgagcgccactcggtgtccacatgcacgccgaacaggttgaacggccctttgcgccacgggctcaggcccatcaacgcagtgtgcatctgcgcgcgggtgtcatcgtcgcagtcggtgtcgagtgtcaggccgttgagcaaatccacgtcgctgggctggatcttgggcagcgcatccagcgcactctgccaacgcgcaaggtcgccatgacccttttccatcttgctgtcgagttgcgcttgcaggccctgggcccacacggccaggggagtgccgaccaggtggcgggcgaggggggacagatcaatcatggcaaggcaatcaacgaggcaaagttaagacactggaaccacggcacgactttagagaacccggccgccagcaggcgttcgcggtgttcttcgaggctgtcgggcttcatgacgttttcgatggcgctgcgcttctgggcgatttccagttcgctgtagccgttggcgcgtttgaacgcgatgtgcaggtcggtgagcagcgcgtgttcttcggcattgttgaagcgcaatttctccgacaggatcaacgcaccgcccggcaacagcgattggcggatgcgcgagagcaacgccaggcgctcatcgggggcaatgaattgcagggtgaaattcagcgccaccaccgaggccggggcaaattgcagtgcgaggatatcgccctcgatcacctcgaccggcagcaactcctggaacatcgagtcctggccgttgaggtattcacggcagcgctcgaccatcgccgtcgagttatccaccgcgatcacccggcaaccgtcagtgcgcacatggcgacgcagggcctgggtgaccgcgccgagggacgagcccaggtcatagagcacgctattgggttgggcaaattgcgccgcgagtacgccgaggttctcgacgatggtcgggtaacccggcaccgagcgcttgatcatgtccgggaacacccgcaccacgtcttcgttgaaggcgaagtccggcacctggggcaggggctgggcgaataggcgatcgggttctttgctcacggttgttccggcgacgattggggaaaggccggcattttagccaacttggccctcggatgcgcgggttgtctgatggaaagccgaggcggtgatgccccattgtcccagccagtaagtgacgatcagcaaatacggcgccgcctcgaacgccaccacaaaccgattgatcccgatcagcgtgtcggaaaacacaaacgacgccgcgcccgccgccgccagcagtgccgagcgttgcggcacttcactgcccaagcgtgccagtgcacgccagagcatggcgctgatcaccagcgcatacaccaccaccggaatcagcaggtcgcccaggccgtgggaaatcaggatgctcagcaggatcgcgcccacgcccaacgccagtagcagcggcagccatgcaagacgacggcagtcgctgaaataggccttgaggtacgccaggtgcgcaaacaggaacgcacccaggccaaagataaacaggtcgccgggccacgccagcaacacgtcgcccaccagggagaaaatcagccccaggctgatccagcgtcgatagtcggtgggcggagcatcatgcagccagcccagcagcgccagcaccggcagcggcttgaccagcaggcacagcaaggtggcatgggtgctcaggccgtagatgaaagtgcccgcgcccatcaacgcaagaatcagccaaggcatatcagttcaccgtaatggcgcagtcaaaggtttcgacgggctcggcttccggctcccagggttgctgggaggtcaggcgcaaacggccctggccggcggcgaacgcctggaagcgccaggtcgattgcccgccgccgccgatcacgccggattctgtgctgctgtagacctcagggctcaacgcacgcagtacgccgccagcggaatcctggatggcccagcggtaaccggtggtggggttgctcggcagggtgagggtcaggttttgtccgcttttaagctggagcgggcaggcgctctggttgtccacgctgatgttttgcttcggtgcgctggcacacgcggccagcagggcaaggctcaaggggagaagcaggcgggcagcggtcatgggggctccgttcattcacgacgaagggcgagcataaccgaagatgagacaaggtgtgacaacaggggattttgtgatgaatgttctggccccatcgcgggcaagccccctcccacattttgatttgtgaacacattcaaatgtgggagtgggcttgcccgcgatggcgtcataccaggcgctagatagctgtcagaagagcaccttcgccacatccgcaaagcgcttggcaaagtgcaccgtcatgccttccttgaggtactccggcaactcttcaaaactgccacggttcggctccggcaagatcagctcatggatcttctggcgccgggccgcgatcaccttctcacgcaccccgccaatcggcagcacatgcccggtcaacgtcagttcgccggtcatggccacgccttttttcggcggctggttacgcgccagcgacaacaacgcactggccatggtcaccccggcgctcgggccgtctttgggcgtggcgccttccggcacatgcaagtgcacgaaggcttcatcgaagaatttcggatcgccgccaaacgatttcaggttcgaactgatgtagctgtaggcgatttcggcggattccttcatcacttcacccaattgcccggtgagcttgaagccgcggttgagcgtatggatgcgcgtggcctcgatcggcaaggttgcgccgcccatgctggtccaggccaggccggtgatcacgccggtgccggacagcacttgctcattgcggaacaccggcatgcccagggagctttccaggtccttgttgccgatcttgatcaccgagtccggctcatccagcagcttgaccaccgccttgcgcaccagtttgcccagttgtttctccaactggcgcaccccggcttcgcgagcataaccgtcgatgagtgcgcgcagggcgccgtcgctgatggtcaggctggttttcgccacaccggctttttccagctgcttgggccacaggtgacgcttggcgatggcgactttttcttcggtgatatagcccgacaggcgaattacttccatgcggtccagcaacgggccggggatggaatccagggtgttggcggtgcacacgaacagcactttggacaggtccaggcgcaggtccaggtagtggtcaaggaattcgacgttctgctccgggtcgagggtttccagcagcgccgaggctgggtcgccctggaagctctggcccatcttgtcgatctcgtcgagcatgatcaccgggttcatcacctccacgtccttgagcgcctgcaccagcttgccgggcagcgcgccgatgtaggtacggcgatggcccttgatctcggcctcgtcgcgcatgccgccgacgctgaagcggtagaacggccggcccagggactcggcgatggatttgcccacactggtcttgcccacgcccggcgggccgaccagcagcacgatggagccggcgacctcgcctttataggcgcccaccgcaaggaattcgaggatgcgactcttgatgtcatccaggcccgcgtggtgtttatccaataccttgcgtgcgtgtttcaggtcgagtttgtcctcgccgtacacgccccacggcaccgaggtggcccagtccaggtagttgcgcgttaccgcgtattccggcgaaccggtctcgaggatcgacagcttgttcagctcttcatcaatgcgttttttcgcctgggccggcagcaccttgccttccaggcgttgctcgaactgttcgacgtccgcgctgcggtcgtccttggtcaggcccagctcctgctggatgaccttgagctgttccttgaggaagaactcacgctggtgctcgccgatcttgcggttcacctcggcggagagttctttttgcaggcgggcgacttcgacttccttgcgcagcatcggcagcactttttccatgcgcttgagcatgggcacgcagtccagcacttcctgcaactcgttaccggtggccgaggtcagcgcggcggcgaagtcggtaagcggcgacgggtcgttggggctgaagcggttgaggtagttcttcagctcttcgctgtacagcgggttgagcggcagcaattccttgatcgcattgattagcgccattccgtaggccttgacctcgtcggtcggctcgctgggctggtgcggatattcgacttccaccaggtagggtgggcggtgatgcttgagccaggtcttgatgcgcacgcgggtcaggccctgggcgacgaattgcagcttgccgttctcgcggctggcgtggtgcaccttcaccagggtgccgtacaacggcaggctggaggtgtcgaagtggcgcgggtcttccggcggcgtgtccatgaagaacagggccagggagtggtgatcggacttgcttaccagctccagggtttcggcccatggttcttcattgacgattaccggcagcacttgcgccgggaagaacggtcgattgtggatcgggatgatgtagaccttgtccggcaggttttgcccaggcagggccaggccggtattggacgaggcggattcagcgttttcggggtcggcgtagtcgttgaggtcgtaatcagggaaatcttgctggtcgctcatggggcacctgcataaggaagtatggtgcttagatggggcggggcagtggtggtttcaatggcggggtggagttagcaacaaattgcatgaattcagctgatcttgtgcagataactcggcaacggctgctccggtaacaccgacagcaccttcaaccgctgcaacatacgttgcctggcccgctgcaaatgctcgcgcaggttcagcgccgccgcatcaaacgcaccatgcagcagcagctccaatatcaaccgatgttcggccagcatggctggatccgcgccgatccccagcaagcggtagaaaatccggctgatgatcattgggctctgaccttggcggatcaacgccgcgatcttgcggttctgcaggccggccaggcagcgttggtgcaagtcttcctcgatctgttcgatggcctccagactgcagtgggggctgtcctgagcggcctgcacgcgctgcaacatggcttcgagcaactcgcggtcgaggtggggcgcgctctggcgcagcgcttcaggttccaggcaggcgcgcagctcgtagtcttcggtgacttcccgtgctgtcaaaggccccgccagccattgcgagtagggctccttttccaccaggccacggtcgcgcaggcgcatcagcgcttcgcgcaccactgcgcggctgacaccgtagtggtcggcggcggcttgctcgtcgaggcggtaatggccgaaggcgatgcaggtggacagcgccgtgccgatctcttcgacgatgcgttcgcccaacggccgcgtatccaccagttcatcctcaccgttgagccccaggtgtgcatggctcaggggcaggcgcagcggttccatggccaggccttcggggttgatcaggtaaccccggccgttgaagcgacagatcaggccttcttcatgcaacaggtccagggccttgcgcaccggcacgcgactggtgccgaacaattcggccagcggtgcttccagcaagaccaggccgtggcgcgcagtgccgttgacgatcgcgtcacgcatcaccttgtgaatcatcgcgtaacgggaggccgaggcggacactgctttcattgcattctctgggctgaagagtctggggccgaggattctctcataagtcgtgcctgtcactctgcgccacgtcggtggcacttttttggggccttgaaagtgaggatgttacttttctgcaccaaaatgtacttattaataaaagatacattatttcattgaaggcgctcctccgtgtccttgcaagatttttcctgccatctaaaagcatctatcccgctgctctgggcaaatatccctcaccgcgcacaaacgtcacgatacagactggcacggaacctgcctttgtaaaatgtacattttattaatatgtacgttttatgaggatcaagtcgatgtcagacgccacttccatggccgaggatttcgccagcggtcgcagcgacccggtgcaagtcctcgaacaggcacttgataaggccagccaaaccccggccgtgttcatcagcctgaccgccgagcgtgctcgccgtgaagccgaagcctcggctgcccgttggcgcgccggccagccattgagtgggttcgatggggtgccgctggcctggaaggacctgttcgatgtggccggcagcatcaccaccgcaggcgctgcctatcgccgcaacgcgcctgccgcgttgcttgatgcgcctacggtcggcctgttgtgccgcgccggcatggtcagtatcggcaagaccaacctgagcgaactggcttattccggcttgggcctgaacccgcatttcggcacgccgcataatccccatggcggcgaccaaccgcgcattcctggcggctcgtcgtccggctcggcggtggcggtggcggccgggatcgtgcccatcgccatgggcactgacaccgccggttccatccgcatcccgtcagcgttcaatggcctggtgggctaccgcagcagcagccgacgctacagtcgcgacggggtgttcccgctggctcacagcctcgacagcctcggcccgctgacccgcagcgtgcgcgatgcgctggccatcgacgacctgctgcatggccgtacccagacccacactgcccgcagcctcaagggccagcgctttgtgctggcgcaacaggacgctgaacccgccgtgcgcaacaatctgctgcgcgcagtggagcaactcaaggcccggggcgcacttgttgaagagcgtgaatgcgcgacgttccaggccaccctggacctgatcaagcaccacggctggctcggttccttcgaagcctttgccctgcatgaagcgctgctcgacagccccgacgccgagcaactcgaccctcgcgtacgtcgccgcctcgaagccgcgcgcgcactgcccgccagtcagcttatccacctgaccgacgtacgccgccgcctgcaacagcaactgatcgacgacctcgacggtgcactcctgatcaccccgaccgtcgcccatgtcgcacccgccctggcagcgctggaggccgacgacgacctgtttgtcaaaaccaatctcgccaccctgcgcctgaccatgcccggcagcttgctcgacatgcccggcgtgaccctgcccagcggccgcgatgcccagggcctgcccaccgggctgctgctcagcgccccgaccggagaagacgcgcgcctgctgcgcgcggcgttgtccgtcgaaaccgtacttaacgtttaaggagacacaccatggctaaagacatcctctgtgcatttggcgtcgacgttgacgccgtcgccggctggctcggttcatacggcggcgaagactcgccggacgatatctcccgcggcctgttcgccggtgaagtcggcgcgccgcgcctgctgaaattgttcgagcgctatggcctgcgtaccacctggttcattcccggccactcgatggaaactttccccgagcagatgaaggccgtggccgacgccggtcacgaaatcggggtgcacggctacagccacgaaaaccccatcgcgatgacggccgagcaggaagaaatcgtcctggataaatccatcgaactgatcacccaggtcaccggcaagcgccccaccggctatgtcgcgccgtggtgggaattcagcaaggtcaccaacgaactgctgctgaaaaaaggcatcaagtacgaccacagcctgatgcacaacgacttccacccctactacgtgcgcaagggtgacagctggaccaagatcgactacagccagcaccccgacacctggatgaaacccctggtgcgcggcgaagaaaccgacctggtggagatcccggccaactggtacctcgacgacctgccgccgatgatgttcatcaagaaagcccccaacagccacggcttcgtcaacccgcgccaccttgaagaaatgtggcgtgaccagttcgactgggtctaccgcgaacacgaacacgcggtgttcaccatgaccattcaccccgatgtctccggccgcccgcaagtgctgctgatgctggaacgcctgattgaacacatccaaagccatgccggtgtgcgcttcgtcaccttcgacgaaatcgccgacgacttcatccgccgccaaccgcgtacctgaacctttgcaaccacccctgaggcgcgacccatgtccatctacaacaagcttgacctgactggctggaaaccccggcaactgacgtcccaggaagtgcgcttcgccacctggatcgcgtttttcgcctgggtgtttgcggtgtatgacttcatcctgttcggcaccttgctgccggagattggccggcactttggctggggtgaagtggagcaagcggaaatcgcgacctgggtcgcggtgggcacggcggtggtggcgtttgccattggcccggtggtcgacaagttgggccgacgcaaaggcattatcttcaccgtggccggctccgcgctgtgttcggcgctgactgcgattggcggcgcgtggggcaagtcgccgctgattctgattcgttcgttgggcggcctgggctatgccgaggagaccgtcaacgccacctacctgagcgagctgtacggcgcctcggaagacccgcgcctgaccaaacgccgtggctttatctacagcctggtgcaaggcggctggccggtcggtgcgttgatcgcggccgggttgaccgcgctgttgttgccgatcatcggctggcagggctgctttatcttcgcggcgatcccggccatcgtcatcgcgatcatggcgcgcaagctcaaggagagcccgcagttccagatccaccagcgcatcagcgagctgcgtaaaagcggtgcggtgaaagaagcgcagaacgtcgccgtgacctacggcgtggactacgacgaacacagcaaggccggcctcaaggccgccttccgtggcccggcgcgccgcgccacgttggtgatcggtgccgcgctgttgctcaactgggcagcgatccaggtgttcagcgtgctgggcacttcggtgatcgtcagcgtgcaccacatctcgttcgagaactcgctgatcatcctcgtgctgtcgaacctggtgggctactgcggttacctcagccacggctggatgggcgacaagatcggccgccgcaacgtgatcggcctgggctggatgctcggcggcctggcgttcgccgggatgctgtttggcccgagcaatatgccgatggtggtcgggctgtacagcctgggcctgtttttcctgatcgggccttactcggcggcgctgttctttatcagcgagagtttccccaccagcatccgtgcgaccggtggcgcgatcatccacgccatggggccgatcggcgctgtagtcgcaggctttggcgcgacccaagtgttgtccgccggcagcgactggcagaccgccgcgctgtggttcggcgcgctgccgtgcttcctgtccggcgccttgatgtttgccgcacgccatgtgcgtccggaaaccgttcagtaaggagtgatcgatgagccgtaaagttgccttgattaccggtgccgccagcggcatcggccaagccctcgcggtggcctatgcccgcgtgggtgtggcggtggttggcgggtattactcggccgatccccatgacccgcaggccaccgtcggcctggtggaagaagccagcggcgaatgcctgatgctgccgttggacgtgggcaataccgcctcggtggacgccctggccgaacaggcggtggcgcatttcggccggctggactacgccgtggccaacgccggcctgctgcgccgcgcaccgttgctggagatgaccgacgcgttgtgggacgagatgctcaatgtcgacctcacgggggtgatgcgcaccttccgtgcggccacccggcatatgaccgaaggcggcgcgctagtagcgatttcgtcgattgccggtggcgtgtatggctggcaggaacacagccattacgcggcggccaaggctggtgtgccggggttgtgccggtcgctggcggtggagttggcggcccgggggattcgttgcaatgcggtgattccggggctgatcgagacgccgcagtcgctggacgcgaaaaattcgctggggccgcaaggcttggcgaaagcggcgcgggcgatcccgctggggcgggtagggcgggcggatgaagtggcgtcgctggtgcagtttttgaccagtgaggcgtcgagttatctgaccgggcaaagcatcgtcatcgacggtggtttaaccgtgcgctggcctgactgatgtacccgatccaaatgtgggagggggcttgcccccgatgacagtttgtcagccagcttatctgtagctgactctctgcaatcgggggcaagccccctcccacattggaactgtgttttctgtaggagatgtgtgtatgcctcaacttcttaaccgtcgcgccgtgatcaccggcgccggcagcggtatcggtgcggccatcgcccgtgcctacgccgctgaaggcgcacgcctggtgctggctgaccgcaatgcggccagcctcgccgaaaccgcgatcacctgccgcaacctcggcgccgaggtgttcgaatgcctggccgacgtgggcactgtcgaaggtgcccaggccagtgtcgaccgctgcgtcgaacactttggcggcatcgacatcctggtcaacaacgccggcatgctcacccaggcccgttgtgtggacctgacccttgaaatgtggaacgacatgctgcgcatcgacctcaccagcgtgttcgtcgccagccagcgcgcgttgccgcacatgctcgcgcagcgctgggggcggatcatcaatgtggcttcgcaactgggcatcaagggtggcgccgagttgacccattacgcagcggccaaggcgggggtgatcggttttaccaaatccctggcgctggaagtggccaaggacaatgtgctggtcaacgccatcgcccccggcccgatcgagacgcccctggtcggcggcatcagcgaggactggaagcgtgccaaggccaaggagctgcccctgggccgcttcggcctggcggatgaagtggcaccggtcgcagtgctgctggccagcgagccgggcggcaacctgttcgtcggccagaccctgggcccgaactccggcgatgtcatgccatgagtgaggtgtagccatgtgcggactctgcgggctgctcggcgaagacctgcactggagcgatcccctgggtgacgaactgccccggcgccgcgaacgcctgcgccggattgcggcgatcaaccaggtgctggcggtgttccggctcaaggtcgaggacttccagggcgcgtcctatctgctgttgggcgctaccgggaaacaggaactggccagcggcctggatcaactctggctagccgccgagaccatgctcggcagccctttggacccgctcgacccacgcttgctcgatcatttggaggcctgcgtatgagcatcgccctcaacgtcatcactggttttcttggcagcggcaagaccaccttgctcaagcgcctgctgcaaggcgaaagcctgggcgacaccgcgctgctgatcaacgagttcggtgacgtcggcatcgaccacctgctggtggaggaggtggcgccggacaccgtgctgctgcccagcggctgtgtgtgctgctcgatccgtggcgagttgaaagacgcgttgctcggtctgttgcaacgccgtgagcgcggtgaaatcccggcgttcaagcgggtgatcctggagaccaccggcctggccgacccggcgccgatactcgcgaccttgaacaacgatgtgcaactgcgcgggcgtttccatatcggcctggtgatcaccctggtcgacgccagccacgcgcccctgcaagaacgcctgcacccggaatggctggcgcaggtggcggcggcggatcgcctgttgttgagcaagaccgatctggccggtgactgcactgtgttgcgcaaccacttgcaggcactcaatgccggcacgccgatcttcaatacccaggacattcacagcggcgaccagttgctgctcggcgaaggtttgcgcagcgccgaacctgctgttgaagtcagccgttggcagttgcatcgcaccaccaccgccacccacggcgccgcacaagtgtgcagcctgacctttgaccagccgctggactgggtgggtttcggagtgtggttgtcgatgctgttaagatgccacggcgaacgaatcctccgggtcaaagggctgctcaacgtgaacgccagtaacgctcccatcgtcatccatggcgtgcagcattgcctgcacgcgccggtgcatttgccggcgtggccaggcaccgaccgccaatcgcgcctggtgtttattttgcgtggcctcgaccctgcgctgctgcggcgctccttcgacgtgttctcgcggcggttcgccgcatgatcacactgcgcgtcctcggcacctccgttaccctgctcgaatgcctgcgcgtacgcgccgaacaggagttgggcattcgcctggtgtaccaggtgcacgacgtcgaacaggcccagcgtatcgcggtgatgcagcccgacagctacgacctgtacgaccagtggttccacaacgtcgactttgtgtggccggcccaggcgatccaacccatcgatacgcggcgcatcgccttgtggcatgagatcaacgacctgcccaagcgcgggcgcctgtcggccgacgaccgcctgggcagtggcagcgtgcccagtgagcggctgttcgtgcagcacgacggcagcctcggcagcacagtcaccgagcgcatcagcatgctgccactgacccacaacgccgacagtttcgcctaccgccccgagcgcttgcctgagggcttctgccacggcaacgagagctggggttggctgctggacccggcttggcgtgcgcgcaccgcgctgcaaagcgacgccgccatcggcgccctggacgccgcactggcggtacagggcgcggggctggccagcttcagggacatcggcaatatgagcatcgaggagatcgacgtgctcgcggacatcctcgtgcgcaaacagaaagaagggcacttcgcggcgttctggtccgatgatgaagaggctgcgcagttgatgctcagcccgagtatcgatatccagagcctgtggtcgccgaccttgatgcgcctgcatcgcgcgggggttaagtaccgcctggcggtgccgcgcgaaggttatcgcgcgtggtttggtgggttgtcgttgtcgcggcatgccaagggggcggtgctggacgcggcgtatgcgtatttgaactggtggttgtccggctggcctggggcggtgatggcgcggcaggggtactacatcggtaacccggcgcgcagtcgtgatcatttgagcagtgcggagtgggattactggtatgcggggctgccggcgcgggaggagttgctgggcagtgatgggttgccgctgatcgatgtgggggaagtgcgggatggggggtcttatgagcagcgcatggggcatattgcggtgtggaactcggtgatggatgagcataattatctggtgcggcggtggggggattttatgcgggctcggggggggtgattggttgattgagtacatatccgttatttaggtaacggccacctatggttccgctcttacagcgggtcactttttgaagagcgctgtacggaccggacacatggttgacgggtgtacggggacatggtggacacttttcggcggataaacttcgccgggaaatcatcatgccttgggacacgagagataccatgagcctgaaagaaga

SEQ ID NO: 24 - DNA, 78670 bp, Pseudomonas nodulensis
ggtcagtcactgatgagttggctgacacaccgccatcgggggcaagccccctcccacagtttgatcttcatgtatcagttgaagggtggtttgctctggctctggctctggctctggcttttgatctgcttttgattttgatcttaggcggccccccaaatcactgtcgaattacgggcacaccgagcctaagcgaggtgccgagtgttggggcaagagcgttttgcttacttttgcgctctatcaaaagtgagccgccgtaagggcggaaccaatatccgccgttacccaaataacggatatgtactcaactcaactcaacctaacccactagccaacccattgtcgccaaaaaaccgccacaaaaccctcgggttttattgggtgcacttaagcccactcccagctaatctcctgaaaccgaatattcaatccaaatggatatttttttgacgccaggtcagcagtcgcagggaatgcacatgacaaagggacgtaatggcagagagaggcgaacgctgccagagggcactgcaatgaggtggcgccacacgttccagacccgcatcgccggggtgctcgcgttgttgctgctggtggtggtagccgccacctatttctctgtgaagaccgccaccgcccgcgccatggaaaaccaggcgcaagtccagctgaaaaccggcagccaggtgttcgaacgcctgctcgatctgcgcgggcgtcgcctgcaatacggcctggactggctgaccgtcgacctgccgttcaagcaagccgtggccgacggcaagaccgtgccgattctggccgcgctgcgccgtcacggcacgggtatccgctccagcgaggtgtttgtgctgggcctggatggcaaggtcatggtcagcacgttgccgatcctcacccgtggccagtttttcccctacgacaatgccctgcgtcacgcgcggcgcacgggcctgcagatgctgatcgtggccttggatggacggccttatctgttggtgcaggatgaagtgatcgacgagctgccgatcgcacgtatcgtcatggggttccccatggacaagctgttcgccaatgaactgcgctccatgagcaacctggaggtgtcgttcctcagcgtgcaggacggccagcccggcccgttgttcagcacgcagccggacgcctaccaggccggcaccctcagcctgttgcgcgaagggcacgtcgaccccgaaccgcagatccatttgttctacggccagcgcgtgctcagccaggtgttgccactcgccaatacgggcgacggcgatgaagtgcgggtgctgttgcaaagcccgctggaccacgccctggaatccttcgcgccgctggaccggcagttcctcgggattgccctggcggtgctggtggtgtcattggccggcgcgttgtttttggcgcggcgggtgtcgcgtccgctcaatgcgctggtgcaggcggccgaacgcatcggcgccggtgactaccgcacgccggtgcgggtgcgcagccatgatgagttcggcctgttggcccgtgcgttcaacgccatgcaaagcggcatcgccgtgcgtgagcggcaactggcgcacaacgcgttgcatgatccgctcaccggcctgcccaatcgcgccctggcgatggagcgcctgggcagtgcgatcagcgcaggcaggccggtggtgttgctgtacgtggggatcgaaaattaccggctgatcaacgaaggtttcggccccgaaggcgtcgaggaaatgctgcgcgaagccagccgctgcctggccatgagcctgttggccagtgacaccgcagcacgcatcgccggcagtgaattcctgctgttgctggaaaacaccgaggtcgaccgcgccgtggcccgtgccgaccgcctctatgcattgctcaccgagccgcagcgcatcggcaatgacgaactgcgccacgaagtaagcattggtatcgccgcttaccctgccgacggccagcaagtggaagagttgatcagccgcgccgccatcgcccggcatgacgccgcgagcctgccggggcatttgcagatctaccagcaggaccgcgacctggcccatcaacgccagatcaccctgatccgcgacctgcggcgtgccgccatcgaaggcgagttgttcctgtgctaccagcccaaactcgacctcaggcacggccatgtgcgccaggccgaagccttgttgcgctggcagcaccccaccctaggccaggtgtctcccgccgagttcatccccctggccgaacgcaccggcagcatgagcagcctgacgctgtgggtgatcgaagaagcggttcgccagatcgccgagtgggcgcaacgcggcctgctgatccagctgtcggtgaatatctcggtggacgacctggccgatgatgacctggcgattcgcgtcaccgcgctgttgatgcagtaccaggtggacgccgagcaactgatcttcgagatcaccgaaagcgcgatcatgcacaacccgcaacaggccctcagcgtgctggagcaactgcgcggctgcggcatcagcctgtcggtggatgacttcggcaccggctactcgtccctcgcgcaattgcagcgcttgccggtgcaggagttgaagatcgaccagtccttcgtacgcaacctcaacggcaccagcggcgacggcgttatcgtgcgctccaccatcgagatgagccacaacctcgggctcaaagtggtggccgagggcgtggaattcgcccccagcctcaagctgctcaaacagtggaattgcgacactgcccagggctacctgatcagccggccgctgaacgcgatggcgttcgagatgtggatgcggcgcgagcgggtgccgatctagaaaagcctttcctgtcgactacaggtttttaaaacagcgtcgataacctctacagagcctgaccgaatgcataggtttttgccgaccgacggtcatgcactgccgcgaattgaatgatggcaattggccttatttgcgtcatcatgcgtgcacttcaacgtttctgtgccaaggctggccgctcttttagcccatttcctgcggatcgaccatggcttggatttttcactcgttatttcgtacagcgctactgctggccgtggtcggacccgcgtcggcggcaacgcttgaggtgttggcccagcaggccgatggtcaacctgttgccgatgcggtagtaaccttgcaaggcccagccgaggcgccgcaaggcgtgctcaaggccgacatggaccagcgcggtcagcgcttcgcgccccatgtgctggcggtgcataccggtacgcaggtgcgcttccccaacagcgacaatattcgtcatcaggtgtattcgttctccgccgccaagcgcttcgaactgcgcctttacgaaggcacgcccactgacccgctgctgttcgacaagcccggcgtggtggtgctgggctgcaatatccatgactggatgctcggctatatctacgtgaccgacgacccgcgtttcggcgtcagcgatgcccagggccgggtgcgcctggaacagctgccggccggtgactaccacctcaccttgtggcacccgcaactggccgatatgcagccgctggatggcggtaccttgcacattcctgctgccggcctgagccaccgtgtgacgttgagtctggaacccgcaccggcggatttgccgccgccgcccagcgcctttggcgatgccttcaatcgagcctcccgtgaaactgcgcaatagttttcaggcgcgggtcgcctgcgtgctgatcgtgctgtcactggtggtgatcggcgcgctgtatttcagcgtcaaggctgcgacccgttcggcggtccacggccaggctctggcccagctggatgtgggcacgcgggtattcgagcgcttgctcgacacacgcggtcggcgcctggccgatggcgtgcagttgttggcggctgacttcggttttcgcgatgccgtcgctagtggcgattcggcaaccctgcgctcggtgctgctcaaccacggcaagcgcatcaacgccagcgacatgatcctgctgggcatggacggcaaagtcctggccagcaccctggcggaagtccccgagggctcgacctttcgctacgaccaggccttgcgtgaggccaagcgcaatcgccaggcgatgctgatggtgccgttgcagggcgagccgcatctgttggtcgaagcctcggtgctggcgccgctgccgatagcgcgggtggtgatggggttcagcatggacgcggcgtttgccgatgagttgcgctcgttgagcaacctggaagtctcgttcctggcaattgaccatgaccgccccggcgagctggtcagcacccagccacaggcactgcgccaaagcattagtgcgctgatgcagggcgactcgacgcgccgtggcgtgtccaccaccgatcatcttgaacacagcttcctcagccaatccctggtgttggccagtgatgaaaacggcaaagtcctggccctgttgcaaagcccgctggatgcagcgatgcaggcctttgtgccgctggatgaaaagatcctcgggatcgccctggtcgcgctgatcgcttcgttgatcggtgccttgctgctggcgcgcacggtgtcgcggccagtgcaggccctggcgcaggcggccgagcgcatcggcagcggcgactatcagaccccggtgctgctggcgcgcagtgatgaactggggcgcctggccctggcggtcaacgcgatgcaaagcggcattgccgaacgcgaacaacagttggcgcacaatgccttgcatgatcgtcttactggcctgccgaaccgtgcgctggccatggagcgcctgggcagttcgattgccctgcaacgcccgatggccttgatctacctgggcatcgacaacctgcgcgccgccagcgaaaccgccggccccgaagcggtggaccaattgctgatgaccgtgagccaacgcctgcaggcggcgttgcgtcctggcgataccctggcgcacttgatcgccgatgaattcctgctgctgctcgaaggtgcgggcagcgacgaagcggtgggcatggccgacaaactgcaacagctgctgctgcgcccccagcgcatcaacggccatgacctagcgctggactgccgtctgggtatcgcggcgtacccggctgatggcgaaagcgcgcacaccttgctggagcgcgcggccatcgccatgaaggacgccgcgcaaatgcccggccgtctgcaaatctacgaacaggggcgcgaccttgcgcaccgccgtcagatcaccctgatccgtgacctgcgccacgcggccaaccagggccaactgttgctgcactaccagcccaagctggatattcgccagggccatgtgcgccaggccgaagcgctgttgcgctggcatcacccgcagttcggcatggtctcgccggctgagttcatccccctggccgagcgctcgggcagtatccagttgctgacccaatgggtgatcgaggagggcattcgccagttgtgtgaatggaaccgccgtggcctgtcgttgcaactgtcgctgaacatctcggcggacgatctgctcggcgatgaactggcccatcgagtctcggcattgctgcgtcgctacggtttgccggctgaccaattgctgttcgaaatcaccgaaagcgcggtgatgcgcgagccggaaaaagccctcaaggtgctcaacctgctgcgtgactgcggcatcggcctgtcggtggatgacttcggcaccggctattcgtcactggcgcacctcaagcgcctgccggtgcaagagttgaagatcgaccaatcctttgtgcgcaacctcgatgaaaccagtgaagacgcagtgatcgtgcgctccaccatcgagatgagccacaacctgggcctcaaagtggttgccgagggcgtcgaatatgcccatagcctgcgcctgctggagcgctggcagtgcgacacggcccaggggtacctgatcagccggcccttgagtgccgacgccttcgaagcctgggtggccttgccgctcagtgcgcaaacttccctggttcattgagtggcatgacggtgcgtttttctttcctgatcggttgccttggcgcactgaccctgcaaacggcactggccgataacggccgcctgatcgctaccggcggcgccagcagcctggaaggcgtggcgggcggagggatcacaccctgggcggttttggccggatatggcgaacaacacgagtggggcgccacggcgttcgcgaccacggtcaacctgccggattatcggctggacgtggccgggctggcgcttgcctatgacaaccgcgtcgaggcgtctttcgcccaccagcgcttcgacctcggcagcctggtgcataagctcaatctgcccgacgacagcctgggccaggacgtactcggcctcaaggtgcgcctgttcggtgacgtgatctacgacacgctgccgcaggtctccctgggcctggagtacaagcaccagacgaactttgctatccccagcctggtgggcgccaagcgcgacagcgacgttgaaggctacctggccgccagccgcttgttcatgggcgctgcgtttggctacaacgtgctggtcaacggaagcctgcgctatagccgcgccaatgaaaccggcttgcttggctttggcggcgatcgccgcgacactcgcaccctgctcaaggaaggctcgctggcattgctgctcaacccgcgctgggcggtgggcgtggagtaccgtgagaagcccgacaacctgtcgtttgccggcgaaagtgattgggcggatgtgttcgtggggtacttccccaacaagcatgtgtcgttcgtattggcttatgcacggcttggcgaaatcgccacgctggaccaccagaacggcacgtatttgtcggtgcaggggagtttctgatgcgctgtttaccactggttttcgccctgctactcagcgcctgcgcccagcaaccgcccaaggacgacagcctctatcgcgacctcggcgccatgcccggcatcacgcggatcgtggagggcatgttgctcaacatcgcccgggatgagcgcatcgtcgaacgcttccggcgcattgatgtacagcgcctgcgcaacaaattgatcgagcagttctgtgtggaagcgggcgggccgtgcacttataccggggatagcatggcggagagtcacaaggggcagaatgtgagccgcagtgacttcaatgcgttggtggaggatttgatcaaggcgatggacagcgaggggatctcggtaccggtgcaaaaccgcttgattgcacggttggccgtgatgcgcggggatgtgatcgaacactgatcccaaaaactacccagataaaaatgtgggagggggcttgcccccgatagcggtggttcagtcacaaatgcattgactgacactcagcaatcgggggcaagccccctcccacacttacagtcctcatgccggtgtcgcttattccggcagtttgaacgccatcacatagtcaccctgcttggtgcccagggaaccgtgaccgccggccatgaccagcacgtactgcttgccgtccttgccggtgtaggtcatcggggtggtctgcgcgccggctggcaggcgaccttcccacagttgcttgccgtttttcacgtcgtaggcgcgcaggtactggtcgagggtgccgctgaggaacgccacgccaccggcagtggtgaaggtgccgcccaggctaggcacgcccatggtcagtgggactggaaccggcgagctgtcacgcacggtgccgttcttgtgcatccagatggttttgtgggtggtcaggtcgaccgcggccacataaccccatgccggtgcctggcacggcaggcccattggcgacagcatggcttcgaggatcacgccgtacggcgcgcctttgtttggctgcacgccctcggtttcgctgacacgcgggccttgcttggcgatgtcggcggccgggatcagcttggacttgaacgccatgtagctcgggttcacgaaggcgatctggcgcaccgggtcgacggaaatgccaccccagtcgaacacgccgaagttgcccgggtaaacgatcgaaccttgcagcgatggcggggtgaacgcaccgtcgtagcgcatggatttgaaatcgatgcggcacagcagttggtcgaacggcgtcacgccccacatgtcacgctctttgagcggcggcggcatgaagttcaggtccgacttcggttgggttggcgaggtgtggtcgccagcaacagcgccttgcggcacggccacttcgtggatcggcacgaccggctggccggtggcgcggtccagcacgtagatgctgccttgcttggtcgacgccatcaccgcttgcttcacgccggcttcggtcttgatgtcgatcagcgatggctggccgcctacgtccatgtcccacaggtcatggtgagtgaactggaaggtccacttcacgtggccgctgtcgatgtccagggcggtgaggccggcgctgtatttttccgagtcttcggtacggtcgccgccgtattggtcgggcatctggttgcccatcggcaagtagagcatgccgagtttttcatccacggcgaacatggaccacatgttcggcgagttgcgggtgtaagtcttgccctctgccaacggggtggtgtcgtccgggttgccgctgtcccagttccacaccagcttgccggtgtgcacgtcgaacgcgcggatcacgccgcttggctcgtcggtggagacgttgtcggtcacgtggccgccgatcaccaccaggttcttggtcacggccggtggcgaggtggagtagtaaccgcctggggcgaagctgccgatgttggcacgcaggtcgacctggcctttgtcaccgaagtcttcgcacatcttgccggtgtcggcgttgagggcgatcagacgggtgtcggcggtcggcacgaagatgcgtttcgggcaggcgttcggtgcggcagccgggctggcgctgccggtggggctctgctcggaagcgtaggcggcgtcatcgtgatacgacacaccacggcaagtcatgtgcgcccagcctttgaagttctcggcaccctggctgctgatcttcggatcgaagcgccagatttccttgccggtgtccgggtcgagggcaatcacctggctgtgcggggtgcacacgtagagcatgccgttgactttcagcggggtgttttccgcggtggtctcgcctggatcattcgggccagggatgtcaccggtgcggtaggtccacgccggcaccagcttgtgggcgttttccggggtgatctgcgccagcggcgagtagcggtcaccgtaggccgaacggccgtaggagttccagtcgccatcggcctgggacggcgcagcgctggccatgcctggcaccgcatcgcggtccagttggccggtcttgaccatctcacccgggttggtgaactggctggccagggcggtagcacccgccagcaccacagccacgctcagcgcgccagtgcccagcggggcaggctggccacgcagcaacggacggcgaaaccacgggagcagcatgacgatacccagggcgaacagcagcgccaggcgcggcaccaactgccaccagtccaggccgacttcccacagggcccacagggtactggcgaacagcaccagcgcgtaaaggcccagcgcagcgcggcgggtggccagcagcaggacgccggtgagggtgatgccgataccggccagcaggtagtacaacgacccgccgagcatcgtcagcttgatacccccggccagcaaggccaggcccatgatcagcagcaagacgcctagcaacctgggcagcaggcggcttgggctcgaagcaccatcagtgctcatagtgtgtttctccgtgacgttggaattatgtaaccccgtgcttcactgtagatgacgattcggcacgggcttggttcagcgttaattcggtttttctggggataagtggagctatccacaggcgggcgatttatccccaggcgcaggtcggggaaagacagcgctgtctttgcgggtgggaataatcagcaagatgaggtcgaccgagggcgtgaaacgtttcagtttgttgcggcaaggataaagggagagggcttcaagagaaagcgtaaatcgcaagatgcatcatttcagatttggtaacagtgacagatagtcgctgctcagtgggttttatgaaaccctactttgtggcgagcgggcttgccccgcgttgggctgcgaagcagcccctgtcaattcaccgcattctttgagaaagactcagtgactggttttggggctgctgcgcagcccaacgcggggcaagcccgctcaccacagtaagcgggttcctacaggttggggggaaaatttttagaaggtagttcgaacgccgaactgcacacttctacccggtgccggcgcaatatcgcgcaggatcgagctggcatagcgcacggtctggttggtgaggttctcgccgttcacgaacgccagccactggctgcctcccatgttgaagtggtaacccatgctggcgccgagggtggtgtagccatcggtgccgctttcgttatccggcacgcgaccctggcccgccgcgtgttccacatcgatacgtgcctgccagcggtccagttcccacagcaagccgctgttcaaacgcaacggtgcgatacgcggcagggcttcgccggtgtctaggttggtcgcgcgggtgtagtcgcccgacagttccagcgcgaacttaccgtaggcgctttcaccaagcttccagtgatcctgggcttcaacgccggcgaaacgtgcacgcacgccggagtatttgtactcggggatgccgtcggcgtcttcttcaccttcatcgttcaacgtgcggccgctgcccaatagcccgatgtagttggagaatcggctgtagaacaccccgaagctgcccttgtgggtgccattgtcaaagcgcagcgccaggtcgctggacacggccttttctttcttcaagttggcatcgcccagctcataggtgccggtggcgacgtgggcgccgttggcatacagctcgtagaaggtcggtgcacgttcggtgtagcccagggtggcggcgacggaccacacgggggtgagggtgtagaccgcacccgaagacacgctgccggcggtgaagtcattggacttgtcggcattggcaaaacgcgcattgcccttggcatccggatcgacgctggtgtgttccaggcgtccgccgaggctgagcttgaggcgctcggtggcctgcatttcttcgaggataaacagcgcgccggcgttggtgtcggtctgcggcacgaaggcttcttcgccgagggccgagaattcgttgcgggtcacttgcgcgcccaccacgccatcgaacgggccgatcggctggtggcgcgcttccacgcgggcttcataacccttgttcttgaagatcgtaccggtctggccgccttcgatttcgcggtgctcgtagtcggtgtagcccgcgtcgagtttcaccgaggtgaacgggccccgcaggttgcggatctccgaggcgaaggcgtagtgatcctgcttcatgcggatacgcacatcctgctcggcaggggagccgtagttggcgtcgtagttgctgtaggacaacccggcataaccgtcgtcccacgtgtaggaaccgcccacggcaccgccgtcctggcgcccgtcgctgttgcccaggcggccattcttgccgggggcgtcgtcggttgccggggcgtggcggctgcgcgcctggccggggattttaaggtcgttgaattcccgcgcgttggcatccaggtgcaaggcgaacgtgccgttgccggcttccagtttgccggcgctgctgcgcgtggtgtcggcgccgccgtagcgcaattcaccggcaccgtggataccttcgatggcttcggtggggatgcggttgtcgaaggtgttgaccacgccacctatggcactgccgccgtacaacagcgctgccgggccgcgcacgatttcaatgcgatccacgttgaccgggtccagcggcaccgcgtggtcgtaggacagcgacgacgcatccagcgcgcccacgccattgcgcaggatgcgaatacggtcgccatcctgcccgcgaatgatcggtcgactggcgcctgggccaaagtaggaggacgacacgcctggctgcttgttcagggtttcgccgaggctgcctttttgttgcagggtcaggtcgtcgccttccagcacggtggtcggcgaggcaagttgctcgctgcccagcgggttgccggtgatgacttggggttgcagctccagggcatgggcttcggagcagatcagcagggcggcggcaagcggggtcaagcgccacagagaagagcgggacatcggacattccttggtaaaacggcgaaatgattggagatttatagttacaatataacatctctttttcgctgggaacgggaacttttttgatcgtgctaaagtgcgcggctgtgtgatctctttttaaaggcccggcatgaccgcgacaagcaacgaccctctacacggcgtgaccctgcaacacgtcctcaccaccctggtggaacattacgaatgggcaggcctggccgaacgcattgatgtgcgctgcttcaagagcgacccgagcatcaagtcgagcctcacgttcttgcgcaaaaccccgtgggcgcgggaaaaagtcgaagggttgtacgtgaagctgatgcgtaccaaacgcccgctggattgatccgatgaagcggtttgtggctgcggcggcgctggccggttgggtggggttggcgattcagcaatacctgattttctattcgcgctggacgtccggcgccagcctgctgggtgggctggtcaactttttcagtttcttcaccgtgctcaccaacactctcgccgtggtggtgttgagctatgcgctggtgaagcgcgattcacccgccaagcggtttttcctcgcgcctggcatcagcagtgggatcaccgtgagcatcgtggtggtgggcctggcgtacagcctgttgttgcggcatttgtggcaacccgaaggcttccagttcatcgccgacgagttgctgcacgacgtgatgcccgtgctgttttttatctactggtggcggtgtgtgcccaagggcaacctgcacctcaagcacatcggcggctgggtgagttacccgctggtgtacttcgcctatgtgctgctgcggggggatttgctcgggcagtatcagtacccgttcattgatgtgggcaccctcggttatccacaggtattcgtgaacgcggggggcattctggcggggtttatcgcgattgcactggcagtggtggggctggacaagctcatcaagccccagccctgattcactcttcttcgctgccttcggcgcgccagtaaccgacggccttgaggaacgcctcattgatctggtgcgtgtccagcaacacgcggcgtacctggcgtgacagcttggtttcggtcgccacgaagctgtacaacgagccactcggcagcgtcagtttgcgcacggtgtcgagcaggtcatcctggccacgaatcacccagatcacctcgacctcggcagcactttgcagcgcctgcttttcgcccgcattggcgatctcgatcacggccagcacgctgcgcccggccggcaactcttccaggcgacgcgcgatggccgggatggctgtttcatcgccgatcagcaggtagctgtcgaagatatccggcacgatcatcgagccccgtggcccaccgatatacaggtgttggccgaccttggcctgctcggcccaggtcgacgcagggccgtcgccgtgcagtacgaagtcgatatccagttcaccgatgtccaggtcgaaacgccgcggcgtgtagtcgcgcatggccggttgcggcccgtcgcccttgatggcgaacgtcgggctttccagggcggcctgttcggcggcgttctgggggaacagcagcttgatgtgatcgtcactgcccaggctgacaaacccggccagttccggcccgcccagggtgatgcggcgcatgcgtggggtgatgtccaccacccgcagtacttgcaggcggcgacgtttgatttcgtgggtaacgcgatggatggtttgtgtattcatgggtttttcccgtcgacaatggcttgggcggtgctattgagcagcgccgcgacacgcacgatttcttccgggctccagcgcccgtggtgcgaatgcaaggcatggcgcaggttgtgcaccgcctcgtggatttccggcgggcggtcctggccgcgcagtgcgcgcttgctcacgtccatgcgcaggcgaataccgtcgagggcaaccgtctgctcacttaagaagagacgaccggcgtcggtgattgtgtagcgtttttttccgccttcggtgtcgccgctgatcagttcgctttcttcgagaaaggtcagcgtggggtagatcaccccgggacttggggtgtaggcgccgtcgaacaggctttcgatctggcggatcaggtcatagccatggcatggctgctcggcgatgagcgccggcagcagcaatttgaggtccccgggggcaaagacccgcgggccacggccaccgcgttcgcggccgccgtgtttttcgaagccttcgtggcgttcgtggcgagggtgatgttctctcatttctgtgttctcctgtcttactaagatacaacttaagatatatcttataagccgggcaagcacagcagaccaacggtcatccgcggaacgtttctctaagggatgtaactctattcagccgcgaggcctgtactcggtatgcacaaggtctggctgccgggctgcaagtaaggcatgagcaacggcgccatgcccttgagtacctgcaccggcagggccgaagtgaaggtgaaatgttcggcggactggccggggacaaacgcggtcaaggtgccgaaatggtgctcgcccagatagaacacaaacgtggcggtgcggttgatcgacttggaactcaggatccgcccaccggcgccgatggcttcgatgcggttatcgccggtgccggtcttgccacccatggccagcggcgtgccgtcggccagcttgaaactgccggcgacgcgtttggcggtgccggcatccaccacctgggacaaggcggcgcgcagggctctggcgacctcgaccgggatcacctgcttgccgggtgccgggtcgttgaccaagtgcgtttcgtacggggtgccggcagcaaatagcaggctgtcgatacgcaacaccttggggcgcacgccgtcgttgaggatgatccccatcagctcggccagtgctgccgggcgatccccggagctgccgatggcggtcgccagggacggcaccaggtgatcaaaggggtagcccagggcctgccagcgctgatggatgtcgaggaaggcctcgatctccagcatggtgcgaatgcggctgtcgcgcgcactctggtgacggctcttgaacagccagctgtacacctcctggcgctcgaattggctggccttgaccacctcgctgaacgtcgcctcgggatggttgagcaggtagccgagcaaccacaggtccagcgggtgcaccttggcgatgtagccttggtcgggcaaatcgtaggtgccggggccgtagtccttgtagagtttttgcaggcgttcgtcggtgagcttttcgttggttttcacgccggtcaggtgtgagcgcacaaacaggttgaagctctcctggctggcggcgggcagcaggtagcggtgcacggcggccaggcggatcggcgtggggcgcaggctgtcgaggaaggtgtcgaggcgggcctgggtgtctttcttctggtacttcttccagaacttgcgcaagaacgtggtgccttcgcggtcggcgaacccggcgaggtattcctggcggcgcgggtcgctgtcgtccttgagcagttcggcgctgttgttctcccctgaataagtgacatagcgcaccacatcgcgcatcagccgaatgaacggcaggttgatcgactcgcgcaaggcgtcgcgcagggtcgggctgcggccgttgtcctggctgcgaaagttatggaagctgtgcaagcctccgccggtaaaaaagcgctcgccggggctggccgagtaggtgcgatccagtgccgcgtcaagcatcacggccagagatttgtccggggcctggatcaggtaatcgagggcccagcggctcaggcggtcctggtcgtcgaccgtgacttttttcagcgcggcgggggcttgtgcggcgtacttgccgtgcagttcggcgatgatttgcaggtaggtggtgagcacccgcagcttggcggtggagcccagctccagcttgctgccttcgttgatgtcgaagggttggtcggtgttgtcggtctgcacccgcacccgtgaaccgtccggggtcagttcgaacagggtgaagctgtagcgcacctgggcggtactggcgggagtgagcagacgctcgccgagcaggccgatctggcgggcatactcggggtcggccaggtgccggaggtaatcgctgacctggctttgcaactgcgcgtgcagggtgctggtagccgataggtcgaggcggtcgaggtcgtacagcggccggtcgagcagggcggccaggcggccacgggcgacgctgatgcctttgttggtctcgatgggttgtaccgtcggttgttgctgccagtcgcggtaggagacttttgcgttgagcgccgcccgcaacaacgccggctcgatcacgccgttctgggccagcaggcgcaagtggctgtcggtgagttgtgccagttcctcgcgccccttggccagataatgcgacgggcgccgctgggcgatgatcagtgacaacacctcacgcagggccaggccttgctcggcgctgacggggccgaccagcgcctggttgacctggttgaaatccgcgccgtaccacacccgcaatccctcggccatgccgtgcacttcaccatgccccggcaccgccgacagcggcacgctgttgaggtagtcacgcacaatgttctgccgcgccggcagggtgtcgggcccgtcgtggtaagcgcgcacggcggcggaaaacatctgccgcagtttctccccaccggacagggtcagcccatccggcgagtgacgatatttctccagttgggtggccagggtgctgccgccggcactctggccaggcaggtgcaacagcttggcgacttgcgaccaggccgccttggcgaaacgcggccagtccacggcggggttggcctggggttgggcggggtcgagcagctcgcggttttcgatgaacagcaggctgttcacgatcagtggcgggatggcggtgaagctggagtacaactgttgcgggtagtcatattggtacagcggcacggcgcggcaatcggtgatggacaacccggcctggattttctcggcgtagggcacaaacaggcccttggcgctgtaatccatcaatgccggggaaaaacgcgcctgggcctcgatcacatacccacgcttgagcaagcgcggcaaaaaggtgtcgaggtcactgtagcccaggcgccgatcgaacgggccggcaccgggatagacgattgcatcgctggggccggacttgacctcgtaggtcaggtcgcgggccaggcggctcagttcctgggcctgcaagcgcgcggtgcgcatctccctggcggcggcaaaccccagggcgatcagcgccatcaacacgatcaaccagaacaggcgacgcccgtagcgtggcctgggtttattttcgggtaaaggcgctgtgtccgaactgccttgtactttcgcagccttggtcgattcggtttgccacagtgcgcccatagtcgattgatccattcacgcagattgatcggacttgcttgaagcgtagtcgctgggcgctgtttgtgagggaaatgtgattttcgagtaagaatcctctgacgcttgcgtagtacgctgcccgacgcgacgttttgtcgctcaatgcaggtcagatgctcctgttaaattgcaatccggcgggcacttccactaaattgcctcgcttttatagtgaaagaccctgctcctggctttttatactgcacgccccgctgatcttgcctggcaagaagggcccgtccatgaggcggccccggtctcggcaaggacgcaggcttaccggcccgcgtcctggagactcgacggacaatccaataacaaaatgaggttgtacccctatgccagtcggcaacccactgccccatggcgagaccgctcaaggcggcccgctcaaacgcgaactcggtgaacggcatatccgtctgatggcgctgggcgcctgtatcggtgtcggcctgttcctcggctcggccaaggccatcgaaatggccggcccggcgatcatgctgtcgtacatcatcggtggcctggcgatcctggtgatcatgcgcgccctcggcgagatggccgtgcacaacccggtcgccggttcgttcagccgttatgcccaagactatctcggcccattggcagggtttctcaccggttggaactactggtttttgtggctggtgacgtgcgtcgcggaaattaccgccgtggcggtgtacatgggcgtctggttcccggatacgccgcgctggatctgggccttggctgcactgatcagcatgggcaccatcaacctgattgcggtcaaggcgttcggtgagttcgaattctggttcgccctgatcaagatcgtcaccatcattgccatggtcatcggcggcgtcggcatcatcgccttcggcttcggcaatgacggcgtggccctggggatttccaacctgtgggcccacggcggcttcatgcccaatggcgtgcagggcgtgttgatgtcgttgcagatggtgatgttcgcctacctgggcgtggagatgatcggcctcaccgccggtgaggcgaagaacccgcagaagaccattcccagcgccatcggctcggtgttctggcgcatcctgttgttctacgtgggcgcgctgttcgtgatcctgtcgatatacccgtggaacgagatcggcacccagggcagcccgttcgtgatgacctttgaacgcctgggcatcaagaccgccgccggcatcatcaacttcgtggtgatcaccgcggcgctgtcgtcatgcaacggcggcatcttcagcaccgggcgcatgctctacagcctggcgcagaatggccaggcgccggccacgttcgggcagacctccagcaacggtgtgccgcgcaaggcgctgctgctgtcgattttcgccttgctgttgggcgtgttgctcaactacctggtgccggaaaaagtctttgtgtgggtcacctccatcgccacgttcggcgcgatctggacctggctgatgatcctgctggcccagctcaaattccgcaaaggcctgagccccgccgaacgggcagggctcaagtaccgcatgtggttgtacccggtcagttcctacctggccctggcgttcctggtgctggtggtgggcctgatggcgtacttcccggatacccgcgtggcgctgtatgtgggcccggcgttcctggtgttgctgaccgtgttgttctacgtgttcaagttgcagccgttgaacactgcccagggcgccacgcgctcggcgtgatgctcaattgacctgctgttgtgccagttgcgccgcttcggtcaactggcgcaccaggcgattgcgttcggcaatctccagatccaccagggattgccgacgttccagataggcctccgagcgcttgtccgcgatctcctggttcaggctgttcaattggtgactgaccacgttctcaatggtcgagaagggctccgggtaactgcgggccaggtactcgatccagaattcctccatcaataatgagttctgcgccgcctgggtgttgctcagggcctccagggtacgacgggcagcagcgatgtcgtgttcatcgacccattcctccaccgcatacagcatttcttcgcgacggatcggcagttggaattgcgcgcgaaaacgcagccggtagtacagcttcacttccgcatcgtccggttccacccctgcttcgcgcagagtctggatgtgtctctcggccaattggtccacctggcggatgtagaacagctgcctggccaacttcagcagttcacggtcggcctggttgctgccggcgtgggaccgggcctggtggacgaggtgttcgatctccatattgataaaagccaggatggcgccgtcgccgcaggtgccgtcgaggtaggtgttgagaaacacccgctcgcgcagctcggtggattgccccatggcatcgagcaggtgccagacccgttcggtcagggcctgctggctggccgggctgtgggtgtaggcatacgactggggcaggtcgcgcagcacccggaacgtgtcatccgggctggcaccctcgttgttgcgcaactgctcccacaaggtctgtcgtgcagcgtgctgctcgacaggcacgccggccagccagcggctgaagtcaatcgacatggcctgctggtgcaagatgcccggtaacgttccaccgatgacaatcccggtgcgatggcgatagtcgcggatcctcgccagggtggtctcgctcaagggattgtcatgcaggactgtgttgcggttggtcggccccatgcgcacatcggaaaatacggcgtcgggaatcgtggtcaagcggttttcctgcaatagcaggtggcgcaggctgctgcggctttcggcgccgatgggccagtgttcaatgttggtctggcgcagcgccagtactcgcaggcggctcatgcgcgagacatccggcgtcagccccagggggttgccatccagatggagttcgttcagtcgggtcatgttggccaatcgctgacgcgactcgcctgtcagtacgatcgcgttgtcacgcaagtccaggtgctcaagctgggtcatctgagtcaggctggcgggcagctcactgagcatgcagtcgatcttcaagtgggtcaggccggtgaatttaccgaggaacgcgttgcctgtcggcgggaaggtatcgccgtcgatccgcaggtattcaatgtgttcgaagccctgggtgctcaagatgaagtcagggtcgggcaggctgttgccgttcaggcgcagttgcagttgatgcgtgtcgaacaagcctgagtcattgtcataggcaacacggctttcctggcgccaggcgcgcaggatgcggtcggcgagttggcggcgtacaccgtagttccaacccaccgggtcggtggctgggtcgtcgacggcctggggtgtttcgatccagcgctgcaattcgaattgcagggactgatattcggccttgcgccgttgcaactcgatcaacgccgccggctcgctcatgtccaggccgtcaatcagttcccgggcgcggaactggctgaagctgggatagagttcgcgcaccttgcccaccaggtccacaggttgattcccactgaacggccagagcccccgcagcgagaacggataggcgatgaatgaactgtcgacccgcatcggcggttgcagccaatacgggatatggggcaggccgagcagttgcttgatggcgatgcgctggttcagcgccagttcggcgatggtgtgttgcaccggggacaggtcgccgccatcgacgatccccaatgccttgcactcggcgtctgacagcaacaggctgatggcgttgagcaagtcgctgccgacctcggcaggctcattgagcaagcggccctgcttgtcgtaggcgtggaacccaccgttgaaccgggcgagtgtgcgccggtcgatgccagcaggctggcccgcgctttccagcaggcgaccgttggcgttgccgtcgtggatgtccaggcgcagttgcggcggccagccgggcagatccttgagcaggtgcaaggtgattttttcgctgtcggggttggccagggtcttgaggtagaggccctcgaaggcgcggttcaggcgcacgtcatgggcggtgagccgagcctgttcggccaggcgcaggccgacttggctgtgatcctgcagttgcttgagctcctgtgggctggcctgttcgaggatggccgtgaccgcactgcggggcatgtgtggaaaacgcgatttgaagcgctgttccagcacgttgccgccttgctcgctttgggcatacaggttgtcgaacaattgcgcgcgttcatggtaggcatgctcggcaattttcttcgccagtttgaacagacgctcctcctcggaggccggcagttcactgagcagtgcgcggatcagcgcatcgttgcgtaccagctttttcaatggttcgcggctgcggctttcggcctcggtgaggcgtatggtctcggccgaagggttgcgcgtggcggggtattggcgaatcaccgtgccttcgctgtcgacgatctccaggcggtggctgccaggccaattgggcaggcggctggcgagcagcaactgcagggaaggccgggcattctgtgtggcggagtaggtgctcatggcctcgataaagtgcaggatgtcgcgctcgatgcgaaagcgtttgcacgtgtcttccagtaacggcggcggtgcctggtgggtgctgtgcacctcgcgcagcgcgcgagcaggcgtacccgtgattctgaggatgcgcgcggcggtgcgctcgtcgacgttgtagtcctgggcgcccaggcgatagagcaggcgatggtcgctccaggccatcgggttttcgctggacaggcgccacgcgccacgcccgttgtgttccagcaggggcgtatcgacgccgaccttgctgggatgcttgagtcgccacttcaacacgcgggtgtcaaactcgatcgggtacagcgagccgtagagcggcagcaggtgttgcccgtccagatcgtagagacccttggcgttgggctgcgcccccgttggcagtaccccatcgtattcgtactggcgcagcgaaaggtcgagcaggctgacatagccgcgcggactgcgttgggcactcatcagattgccgagtgtatttcgcaacccctgtgcatcagaggctgattgcatgcccagcttcagccgctcgtggggttgcagcaccgagccgatcgccaggtagaaactgtcgacggccggcgacaccgggatcggcccgccgttgcgcatgtcgtaggcttcatagcggccctcgccgtaatgcagcagctcgaccgtggtgtcgtcggggcccgtggatacatagcgtggggtggccttgctggtggcaagctcggtgacgacgaactgtcgatccaggacttcgcgcagcaggctggtggcaaactcccgggcccattgatcgttgtcggcatggaacacgcgcgggtggtacaggctgtcgagggccacatcgatgcgcagcgcggcgcggtggtggtccaagtggtcacgtaccgactgcggcaacgtaccactttgcaggaacgtggcctgctggctcgcgttcaagggcacgtcttccagcagctgtgccaggttggccggggtcaatggcgcaaacctgtcgcgcagtttgcgcagcacgggcgtgatgggcaccagcggtggcgcgaccttcaacgggataaacgcgcgcgcggtgtccgcggcgggcagttcgtgccgggcatgtccggcataccggtacaaggcgctgaacagtgccagccggtgagcctgggccaactcgctgatttgcagccgcacacgcgcaatgcgttgggccggcgtcaagttcgggctgccttccctgcccagtagcgaatttgcaggctgttggtcgatgatcagctcgaacagttgctcctgggaggtgaccgtcgtgtcggcgccgtcgagggcgatgtaggtgccatcgtcgcggcgtttgagcttggtgatgctgcctgtggccgctggagtgtccgtggcggcataggtttcgatgagcgcgccttgggcgtcatacacctggatggatacctcgctgggccacccaggcacttgcgtcaacaggcacagcacggcgccatcggcatggggcggcatgtagccgcgtcggtggaagtcgctgatcaactggtcgatcacccggtcgacctgcaagcgcctgaccccttcgatcaggttgatgggcgccagttctccggcccatacgctgtccagggtgctgcggctgggcgcgatgctgcgcagcatgtggtccatgtccaccctgggcaccgggcttgaaccattgggcagcatgcgctcgatcagttggatgtccgacagggcgtgggcgttcttcaggtccagggtccaggcttgcagggccgggttgaacacgattggtggggcggcattgctgccgttttcctgtttgagcacaaaccccagggccttcgggtcatggtcgacttcaacgacccgttgctgttcgccatgtttcaaccacgcgtattgcctgccattgatctggtagacgccctgcgcgttcggcgtctgcccgttgagcaggttttgatcaaggatcgcgtacgtaccgatgtcgggtttccagaggacagcggtgccgtcgctgcgggtcagcttctgcggattgcccaagcgttgcaacaaaccctggatgcgctgctggtgcacccggccggccgtggagatcagcaggccgttgatcgccaggtccgctacatccgccatggcggcagcaaaatcactggcctggcctctggcaacttcgttgaaaccgatgatgacgctgtaggtgaggctgccaaataccaccgcctgcatcacccggttcaaaccggtgacgccgccgggcatgggtgtcagcaatagttgcaggatttcgtcggcgatcgccgcagcacctgccatgaccgcttgcaggtcacgggtcgagcgacgggttgccaacgtcgcgagattcgcctggtagtgctggatgtgacggtaggtgagggcttgcgccaggctttcggtgcgcccgtgtttcgggtctggcgtgaagcgcaggccgtccagggtcttggccgggaacaggcggtggaaggtgtcgtacaggaagcccgcggcggcactcagattttccgggcgctgctcactggcgtccaggcgtttgaacccctgcatttcggtcatcggcagttgccgtgaaaaccagcccaggtcgtgcctgcgatggccgtccttgagttgttgcatgaagtgggcgttggcggcgttggcgtccgcgtgatagtgcatcgcgccgccgggacggaacgggaaataagacaccaccccgaggctgcccacgcgaatcagcagcaggggcaccgggatggtctcgccggacggcacgaacggcaccgccggcagcagcgtgacgccggtgctcatcccgagtgtttcaaattccagtgccgggccactgccatcaatggcttgggtcaggcggtcgtagagttcccgggtgagcccggtgacggcacggtttcggtaggcttccaaggcttcgaacctgaggtttgcgagtgtgctctcgtgcagcagccgttgcagttttccgtccttgcccaaggtcgccctgagggtggtatccagttgcccaccgaggtccaggtcgcgggcgatgtcgacaaaggctttgacggtcagcctggggttttcattgcccgtcaggtaggcggcatcgatgaaggtggtccccgagcgctgcggtgtgctggtggcgaagtcgaaattcaggcaggccgcctcccacaacgacaggctggacacgtgcgagcgatatttccattcgtcgtaggcgcggcgaaagcgccgcaggttcggcgagagactggtggtgctggtgcgcggttcccagggcagtggcgcctgcacttcctccagatagcgggtgtgcaggaacacttgcagagggtcctgattgccgatgcgctcgcgcaatcgggccagcccctgggtcttgaacgtgttgatcaggttgtggttttcggactccactgcggtaagcgcctggagcgcttcgcgttgcagccgtacataagtgcgctgttggtccggggtgaggctgtcgagtgtaagtgtgagcgtgcgctggatctgttccagggcttgttgttggccccaggcgtcactcgattgcaggttgcccgacagaccgttgagcagttgatgggttggcatggaccatttcctttcaccgttgaagtggaaggaaatggaatcaccctgccggttttaccgggcgctacctatgtagcgcgggcttggcgaccgcgtccaggcgcttgagcatgtccagccagacggcgaggcccaccatcaacagcgcaccggccacggcggtggtcagttgcatggccactgcatcgttggccaaggcgttgagcatgtctgccaagggcgccagcaccacccccaggcagaacacttccagggaatagcggcccatgcggcatacctcagtggcaacacggttctgcgtccagccgtggtggggcaacagcttcgccgtgacgtaggccagggcgaggaaatgcaagagccgcaccggtgacaaatcggtcttgctgatcgggtacagcccgtcactgagccacgccggcatccacgcgtcgtgcacttcgggccagcgccacgacagggtgatcaccgctgccagcaacacatacagggcgcacgcgacaaacagcggctggcgcgacaaggggcgtacctgcgccgttttcggccgctggctgtacactgccgccgcgccgccgagcacgaacagcaactgccaggtgaccgggttgaagtaccacacgccgtcggcaatcgcgcgcaggttccagcccatccaaggcgccatcaagtagatcgccagcgacacggccaccacggcctcgaccttgcgcatcatcatcggcagcaccagcggcaggccgcccaacagcacgatatacagcggcagcgggtccatcaggttgggcttgaagcgcagcagcagttcgtcggtcagcgcctgctgcgggtgggtgacgaagtgtgtcaggcccatttcctcgaccaggtcgcgggtttccacatggctgttggcaaagaacacgatgcccatcagcagcgccagcaaaaagatatgcaccacgtacagcacccaggtgcgtcgcaggattttcaaactggccagccagtagccgtcgcgccgcaggatcttgccgtaggcgagcacggcggcaaagccggcgaggaacacgaacacctccgcagcgtcgctgaaaccgacgttgcgcaaggtgatctggccgagagggttgtgggggacgtgatcccagaaaatgaagatcaacgccaggccccgaaaaaaatcgatgcgtgggtcgcgtccgtcaggcatggctacgggctcttgaatatcaggtttaacaaggacaggtgagcgtgggcgttgtcgtacgccgcacgtcgggcgggcgcaggttggcggtatttgtaagcaattgcaaaggttgggtattactgaatgtctctagacatcaatgatgacacgcgtgccatggcggccgccgagcaaggcgtgagcgatacccgcttccacccggcccagctgcgtcgatctccaactgtccggcagttgcccggcgatggcagcgaagtctagtaacggcatgtgaatctccttgtttcaacgatgccgtcggtggtccggttcagcggtgaaggtcgttatcttgatgtcacgcggcgctggcttcgtggggttcaaagctgtccgcccgcgccatctgccacatccgcgaatagaactctccgttcacttcccctgtgagcagttcgccaggcttgaggaacacatgcaactgcgagaacaacttgatctcggtcgccgacatacgccgcaccaaatgcttggccgacagttgcgatggatgctccaggcccgccgccgcgagcatttccgccagggccttgagggtgttgcggtggaagttgaacacgcgctgggccttgtccggcaccaccagggcgcgctggcgcagcgggtcttgagtcgccacgccggtcgggcatttgttggtgtggcagctttgcgactgaatgcagccgatggcaaacatgaagccgcgtgccgagttggcccagtcggcgccgatggccagtacgctggcgatatcgaaggcgctaacgatcttgccgctggcgccgagcttgatcttgtcgcgcaggttcagccccaccagggtgttatgcacgaacagcaggccttcgcgcagcggcacgccgatgtggtcggtgaactccaccggcgcggcgccggtgccgccctccttgccgtcgaccacgataaagtccgggaggatgccggtttcgagcatggccttggcgatgcccatgaattcccacgggtggcccagacagaacttgaagcccaccggtttgccgccggacagttcacgcagttgggcgatgaactgcatcagttcgatcggtgtggagaacgcgctgtgacgcgacggcgagatgcagtcttcgcccatcaggatgccgcgggtgtcggcgatttcctgggtgaccttgtgcttgggcaggatgccgccgtggccgggtttggcgccttggctcatcttgatttcgatcatgcgcacttgcgggttctgcgcctgtacggcgaagcgctccgggtcgaaacggccatcgctggtgcgacagccgaaataaccgctgcccagttcccaggtcaggtcgccaccgttttcgcggtggtaggggctgatgctgccttcgccggtgtcgtgggcgaagttgccaagcttggcgccctggttgagcgcgcgaatcgcgttggcgctcaatgaaccaaagctcatcgccgagatattgaacaccgatgccgagtacggctgtgtgcactgcgggccgccgaccatcacgcgaaatgcgctggggtcgctgagcggtgccgggcgcatggagtggccgatgaattcgaagcccgactggtacacgtcgatcagggtgccgaagggtttgtcggcgctttcgttcttcgcccgcgagtagaccagcgagcgctgggcgcgggagaagggcagggcatcgctgtcggattcgagcaggtactggcggatttccgggcggatggcttccaccaggtaacggatattgcccaggatcgggtaattgcggcgcacggcgtgggggctttgcagcagatcgaagaggccgatcaggctcaacacgccggtgaccaccgtgatgggccacagccattcgtgttcgataaaggggaggctggcgagggtgaagatgacgcacacggcaaagaaggcgtaacggcttagcaaggacaggctcatacggtttccttgggttcagactcttttggtcggtccggcattctgcgcctgtaaggaaaccctagacaacctgtgggaatgttcaatttgacctgctggatgagacggactggcctgatatagagagcttgcggctatcagtgacttcgaagtgggcctggttgtcggtggttgaatcacccccaacgaacagggtgaaggtgccggcttccacccttgactcaaaatccgcatccagcactgcaaagtcattagcatcgagggtgaaaaccacctcctgcgtttggccgggtcttaaatgcactttgcgaaagccgcgtaactggcgcacagggcgggtgacgctggcgacagtgtcacgcaggtacaactgaacaatttcatcgcctgcgcgtgagccggtattggtgacgttggtccgtacagtcaaggtttggctggagctgaggcgcgtgctgctcaattgaggcatgccatagctgaacgtggtgtaactcagaccgaaaccgaaagggtataacggggtcgagggttgatcgatgtaacgcgatctccaactgtcgtcctcgcctacaatcgggcgtccggtgtttttgtgcgcatagtagatgggaacctgccccacgctgcgggggaaggtcatgggcagtttgccgcttgggtttgtgtcgccgaacagtacatcggccacggcgttacctgcttcagtacccagaaaccaggattcgatgatcgccggtgctcgctcaacggtgccggtcaatgccaatgggcgcccattcatcaggataacgaccacgggcttcccggttttcaagagagcccgcaagagggaattctgggcgccgggcagatccaggctggcgcggctgttggcttcgccgctcatgtctgaggtttcacccaataccgcgacgatcacatcggcctcttgggcagcgttttgtgccgctgcaataccctgggtgtcctggcttgacggtgaagcgccgggcacatagatcactcgactggcgggggaggcggcgttctgtatgccttgcagaattgagaccgccccaatgggttgctccacagccatacagtttttcaggctggcagcgacatccgttgcgaggctgccgacgaccagaatcttttgaagatctttcgacaagggcagcaatgaatcggcatttttcagcagcacgatggacttttgtgcggcttctcgggcaagtgcgcgggcttgcggggtttgagacagcaagcgttgccgggttacatcactgtagcgatagggatcatcgaacaggcccagccgctgcttggccttgagtacgcggcgtacggcgttgtccacggtcgccatgggcacttggccgctcctcaccagataggggaggttctgcctgaaaaactggttggccatttctatatccaggccagcttctatcgcttgacgtgacgcgtccaagggcgtcgctgcaacgccatgggtgatcaattcagacagtgcgtcatggtccgagacgatcattcccgaaaacccccatcgccgacgcagcacaccgtcaagcagtgcctggttgctgaccatcggcagcccctcaagttcgttgaaagccggcatgatggcatcgacgcttgcctgaacggcggcctgaaagggtggcaggtagacttcccacagcatgcgttgcgacaggtttacggtgttgtagtcgcgtcctgcttcggcagcgccgtacgccacgaaatgtttcgcggtggccaacatgaacgccgtactggtcggcccgtccccatgaaaacccattattcgcgcccttgtcatagccgcgcccaaaaacgggtcttctcccgagccctccaccacgcgtccccagcgtgggtcgcgagtgatatcgatcatcggcgcgaacgtccaatgcacgccactggccgtcgcctccactgcggcggcatgcgcggtgcgctgggtgagatcaggctcccaggcactggcttcggcaaggggtaccgggaacatcgtgcaaaaaccgtgaatgacgtctagagaaaacagcaaaggaatatgcagtcgcgagccttccaccaccagacgctgcaattgacgggttttttctgcaccgctggcgcctatcactgcgccaacatcagtcatcgccaggtgtttctggctttgcagatcaatgatggccccgtcaggggtgtccactatgtgcaacatcgtcagttggcccaccttttcttcaagggtcatctgcgccagtaggtgctcgaccccatcatcctgtgccatcgccaccaacggcaggtaagacagcagcaggatcagcagtcgacgctccatgcgtgcgttccgaggcagtgggcttacgtggagtgtctggctagcagctaacaacgtctactgtgagttctgacaggtctatgcttattgcaatcggttctcgtttggctgcattatttgtgttactgtataacgctagtttcgcactcagacgccccggaggccttatgaaagctggtatccatcctgactaccgcaccgtgctgttccacgacaccgccgccgatgtgttcttcctgatcggctccacggccgacagcgaccgcacccataaacacagcgacggcaacacctacccgtacatcccgttggacgtgtccagcgcctcgcacccgatctacaccggacaacagcgcaagacccaggccgaagggcggatcgccgggttcaacaagcgtttcgcgtcgtttggttcgagcccgaaaaaagccgaggcgtgagcacattacggcggcatgtcctacgccgccgtctgccggatcggcaacaccacccgaaacgtcgtacctttgcccagttcgctgctgacggaaatatcgcctcggtgttttttgacgatgccgtaggaaagcgataaccctaaccccgtgccttcacccaccggcttggtggtgaagaacggatcgaagattttctgcacagtctcaggcgcaatcccacagccgttgtcggccacttccagccacacatgctcgccttccacaccattgctgatggtaatggtgccgcgctctggccccatggcctgcgcggcattgattaccaggttcatcaccacctggttgagctgagacgccaggcactcgatttccggtaaggggccatagcgcttgaccacatcggccttgtatttgagttcgctggcaacaatgttcagcgtcgaatcgatgccctgcagcaagttggcgaattgccaggtctggtcattgtccacccgcgagaagttcttcaggtccttgacgatctgtatcacccggccgataccttccttggattcactgatcaggatcggaatatcttccttgagaaaatccagttccatgtcttcacgcattgccttgagttgatcgcgctgctctgcgggtacaagggcgtcttcggcctgtcggtaggcatccagcatctgttgcaactgcttgaagtagccgtccagggtgctgaggttggaggagatgaaacccaccgggttgttgatttcatgggccacaccagccgccagttgccccagggatgcgagcttttccgactgcaccagttggctttccaggtgcttgcgctcgtcgatctccagttgtagcgcttgggtgcgttgttccaccagctgttccaggtgtgcggtttgcagggaggcgcgccgggccatgtcccatttgttggccagggtgttggccatttgctgcacttcaatattgtcgaagggctttttcaggatcagcaggcgatcatgggcgtgcaggcgttccagcagatcttcccaggaatagtccgagtacgcggtacacaccaccacctgcaggtctggggcgactttccacagctcctctatggtttttgcgccgtcccagccctggggcatgcgcatgtcgacgaaggccagggcgtagggttgtttgttcgccatggccgtgacgagtagttgcaggccttcctctccaccgtatgccgaatgcaactcgaacacctgggcctgggctttggccgtgtcgccgaacagggccgactccatgtcatccagcgcctggttggattcaacggcaggcatcaggattttgcgaaagtcgtcatgaatcgacggcgtgtcgtcgatcaacaaaatgcgccggttgggcggttggttcatggggagtttccgacaagtgtgagaggaatcgtcaaggtaaacaccgcacccaggcctggcccatcgctgtgggcgctgagctggccgttcatttccacggcagccagggcgcagctgtgcaagccaaagccgtggccgtccttgcgggtggtgaagccgtgggtgaagatccgtgtcatgttttccgccggaataccttcaccctcgtctttcacgctgatctgcaaggtgtcatcggcacccggctgcacgaccagggtcatttgtcgtggtcggtcggtgaggttggacatggcgtacttggcgttgctgatcaggttgaccatgatcagcaacaaccggtgtttatccccgaggatttccggcacttgcgcgtactccttgaccaccgtgacgtggtggcggctcaaggcacctgcgttcatgcgcaaggcatcttccatcaaggcaccgatgttgaccggctccagcagcgtggacacaccggcataggattgttgggtggcgacgatgtccttgatgtggtcgacgcttttgctcagttgcgtcagctcatcggtcatgccctgttgctccacggtgatggcgtccaccaactgattcaagtagccgggcagcaatttgcctttttcatcttcggtgagaaacgtgcccaggtcagcctggcgttcgttgatcaactgcatggctttgcccaggcccagggccttgctgctgcgcaatttgcggctgaccagatcggcggagatgttcacgctgttgagtacgttgccgacgttgtgcagcacgttggtggcgatctcggccatgccggcctggcgggcgctgtccatcagttcactctgggcatccttgagttgctgggtgcgccgctccacccgttgctccagggtttcattggccgcctgcaaggcgcggttgacccggttgatctctgtaaaactgcgcaacaggcgtacggcaaggtagagcaacagcaccaccagcaaggtggagaaaatcagcaagtagcgatggtattgatggtcgatcaggtcggcggtctgctggtcctggttgaggtgggtggtcaggtcatccaggcgttcggccacgggcaccgccgcgatccgttcgagcaggttgttaaccaatggctgctcgcgcaggatcagcgaaatgtgattgctgagaatatcgaccggcgcctggaactgactgggcagcagttccttgttgaccgccagcttgcccaggccgacgagaatgtcggcggctcgatcatcactggtgacctgggcgaactccaggctgctgagcaacaggtcgtaggtgtcggtggccacgctttgcagttgctgcttactctcatcgtcaacctgattgaactgcgcctggatatcgtcttcggccgttggcaggaaggccagcgagttacgcagcactgcgttatgggatttgaactggtcgaccaacctggccttttcctggatggccgcctcgtaggcttgttgatcggcttgccagcgcggcaggtcgatggcctcgtgataggagccgcggtttttcagctcggaccacagccgagtcatttccagcaggggagcgaccagggggtcgtagttatgggtaatggagatccgggccttgagcacctcgctgtcccattgcgcattgagctgctggagttgccggatcaggtcccgcgactgggtgtaggtgacggtctggtcacgggctgacttgaggtacagaaagaccagcgtcgaggccagcagcacggtgatcaggccgagcaggagctggctggtacggcgggtggacagggtcatagcggtttacctgcccattcgcccgtcagggtcttgagaaattgaatgatcaggtctttgtcttcctgggatgggttgcgccccagttgatacttgaacatcacatcaactgcttcctccagggtcttggcgctagcgtcgtggaaatacggcgcggtgacggccacattgcgcaggctgggcaccttgaacacatggcgatcctcttcatccttggtcagcaggtagcggccaaggtccgattccaccggattgccacgggccttgaagtaatcgcccatcacgccgaacttctggaacatgttgccgccgatattgaccccctggtggcaggcaatgcagccatagtccttgaagcgctggtagccgtacttttcctggagcgtaaggatctcggtgttgcccagcaggtactggtcgaatcgtgagttgggcgtcagcagggtgcgttcataggtcgccagggcgttttgcacattggcggcggtgacgccatcggggtaggcctggctgaacgcgtgctggtaggccggcatggcggacaggttctgcaccacggttttccagtcgctgcccatttccaccgggctgatcaccacctgttcgacctgggcttccagggtgtctacccgaccattccagaactgtttgaagttcaggctggcgttgaacactgacggcgtgttgatcgcgaccggcttgccgtcgaatccgagggaaaacggcttgtcgtcggcaccgccggacgccagtcgatggcagctggcgcaggacagcgtgttgttgaccgataggcgcggttcgttgaacaactggcgacccagctcgaccttggccgggtccagcgccgcaaccgcaggcagcggcttgagtgcctcatccagtggtgccgccatcaatggcgtcgacaggcacaggatgagcatcaggccaagacggtaagttgagacatcgctcaagcgagcactccttgcaagcatagggctatgggacgggcatcaatgttgtgcagcccacttgcagcaactgggcgaagtccttcgcgggcacggccttgctgaataaaaagccttggccctcttcacacaactgggttcgcaggaaattcagttgatcgagggtttctaccccttcggcgatgatactcagctccaggctcttgcccataccgatgatagcgctgatcagttgctcgtcctggttatttacgttcacgccgcgcacgaaggactggtcgatcttcaacacgtcgataggaaagcgtcgcaggtagcttaggctggagtaaccggtgccgaagtcgtccagcgccaggcgcacacccatggccttgatggtgtgcagggttttgacggtttcgtcgacattttgcatcagcacgctttcggtgatttccagctcaagcaaatgcggcggcacgccggtttgtttcagcacggcgacgaggttgtcgacaaagtcgcgttggcgaaagtcgatggccgagatgttcaccgagatgcacagcggcggcaggcccatcgcacgccaggcctgcacttgctcgcaggcttggcgcagcacccattgggtcaggcgcacaatcaacccgctgtcttcggccacggggatgaaatcgcctgggctgacccagcccgagtgtggctggaaccagcggatcaacgcttcggcgccgacgatcttgccggatttcaggtccagcttcggctggtagtgcagcacaaactcttggcggtccagcgcctggcgaatcgcgctttccaggttttgctggtgtcgggcgcgccggttcatgtcttcggtgtaaaagctgaaaccatccgggcccagttccttgcgggtgcgcatggctgtctcggcgtgtttgatcagttccacggcattgccgctgtcatcggggtagatggcgatgcccaggctggcggtgacgctcaggtcgtgccccgcgacatgtcgtgtggcgctcacggtcgtgagtattttttgcgcaatatgctgggtttgcaggggatgctgcacatcgttgagcaccaccacgaactcgtccgcgccgtagcgaaacaccgaatccgatgcacgcacggccgccaccaggctgtggctaacctgttgcagcacctcatcgcccactggatagcccaaggcattgttgatgcgcttgaagcggtccagcccgataaacatcaccgccagttgcgtgtcatgccggtgacccaacgcaatcgcctgcgtcagccggtcgcccagcagcgtgctgttggggagcccggtgaggacgtcgtattgcagcaagtgggaaaccttgagcagctcctgcacacgttcttcgatggtgcgctccaggccaacgactttcagcgccatgtcctgtgcaagctgccacttccaggtcagggcactggccatctggcggatttccaggtgatcgaagggttttttcaggatcagcaactggtcgttgtacttcaaccgggcctcgatggcttcaaaggagtagtcggaataagccgtgcacagggcgatctgcaggttggggtcgacgttccacagctgttcgatggtctgcaggccatcccagcccggcggcatgcgcatgtcgatgaatgccatggcgtagggcgcgttggcggtcagggcccggttgaccaggtccagggcttcctcaccctggtaggcggagtccagttcgaaggcctggcgcgctttaggggcggtgccgaacagcgtttcctcaaggctctccagcgaagcctcgccattggcatcggcgcagagaatcttgcggaagtcctggtggatcgaggccgtgtcatcgacgatcaggatgcgccggttggcccttatggagtcagcagtcatggcgtgctccgtgaccacaaaaggattgactgcataacgattccttccctgatttagcttcggagcggggcgccaacctgttctgtcagcatagtcgaggtcccttgatatcgacggccagttggcgtcaaatcaaccccgcgcctcaggcgaaggaagctggccgggcacaagggttcaatttagctcaattttgtttgatttgaaggcgcggtcaccatggatgaaaaaaccactgttttgctggtcgatgatgaagagtcgattctcaacagcctgcgtcggctgttgcgcggtcaatccttcgatgtggtgctggccggcagcggcgcccaggctctggagatcatggcggcacagcccatcgacctgatcatgagcgatgcgcgcatgcccggcatggatggggcccagttactggccgaagtccaccggctgtacccggccaccagtcgtatcctgctgaccggctacgctgacgtgccgaccatcatcaaggcgatcaacgaagggcagatccaccgttatatcgccaagccgtggaatgacgatgaactcaagctgatcctgcagcaggcgcttgaacatcagcggcttgaacggctgacccaggtgcagaacgaccagctcaaggcgctcaatgccaccctggaaaagcgcgtcgcgtcgcgcaccgccgagttgcagcaaacggccgacatgctcgacctggcctacgaagaactcaagcgcagctacgtgaccggcaccgaagtgttttcgctgttggccaacctgcgcctgcccagggacaaacagaccaaccgcgcgctgatcgaactgatccgcgtgtactgcgccgcacaggccatggatgaagccagcacgcgcgacctgaccatggctgcggcgttgtacaacatcggcaaactgagctggagcgatagcatgctggtggagccggccgacaagttgcacagcaccgaccgcgaacgttaccgaggctaccccggccagagcgaatcgctgttgatgaccctggagccgatgaaggatgcggcgcggatcattcgccatcaccaggaacgctgggacggtacggggttccccgaccatctcaagggcgaggcgattcctttcggttctcgcctgctcaagctggcggtggatttcatcgaattgcaaaagggcctgatccttgagcggcagatgaacagcgatgaagcgctgctttacatccgcaagtacgccgggcgtctctatgatccggagctggttgaagattttgtgctggcctgcgcggcgtttctcagtgacgtgacgctgggcgatccaacggtcaaggtgttcaccacccgcgagctggaggccggcatggtcctggcccgcaacctcaacgccgacaacggcatgctgctgctcaacgccggcaaggtgctgaacctgccgctggtggacaagctgatcgcgttcgaggcgatggaaggggccaagtacagcgtgtttatcaaggttcccgatggggcgccgttattgacgtagcgtcttctaaacgccccagactcttcgccggctggcgtgatagtcatagatgcctttgagcagatagacatctctctcgccttccttgccggttttctcaaacgctacgcgccatgaaccgcggcccgagcctggatccagctggggtaagtcgacataggtattggcaccaatttttttccgactgatacggccgccctggatatcctggatgatctcctcaagtttgtttttggcattggtgggtaacaggggtagctgcgtttctgccagttcgtccagcttgacgatgttggtggccgcctcgctgggtggtacgggggcaggcggtcgggaaatgtcgggtcgccccgatggcttttcaactttgtgcgtgcgtgggcgtgccggggtcagttccaagggggttgaaaacttcggaatggttttttcaaattcagcgacagtgacactgtcgattacttttaagccggaggctgttccggtgcgttcgccgtaagacaatgcaatgtacggaaccccatatttcttgaagtcatcggaaatggagtcgacgccgagtttgttgaggagttcgtgacgtttttcgatcctgaacgcttccagcgcttgtttactttcgggagtggacagtaattgttgcagtgcatcattgaaggtgattttgtgattggcggctatattctcgacgatttcagttcgtcctttttcacttagaaaagccttgatagtgtcgttgttccacgtggacagttggtactttttgtcaaatttatcaaggtttttaaactgtttgtaggtgaacgcgtaccccacgagcttagcgccggtttcgtggtcagcaatactaattgacgctctgatttgttttgcgaagtcatcattttttccgatgagtctttttatttttaaaaaaagattctccagttcgataggtgagagcgtcaggtattcggataaaaagtgggttgttttattcaggtgctcataaaggtgcgcgtcgaattcaatcgttaacaatgcctggcgtagttggggcgggcgtgctgacccctgctgcccccagacgatgcgccgaaaggtgctttcatcgacattcaactgttgcagtgcgttatcccaaagccgacgtttctgaaggacagtcagttccttgagcagcgcttcgccgtgctcagcgggtgaaaacatgcgcaatgcggcgagcaagtcatcatccacttgctgttcaggcgttcgcgttctcagcacacccaacacagacccgccgccccgtgtggttcgttcaaaacgtggcttccagcttttcgcgtctcccggaaccaccatgaagtctgccttgttccccgcagggtctttgacataccgggcgccgtcttccacgtaggacgcatacagatggtagcgaccgtcgtcagcccgcatggcgataacgtgttggttgcgactgtcaatgaagctgggcgcgcccaatgtgcgcgacagcctgtactgattggcctgggcaaattcgtcgacgtcgaagagcgcatcgatctgttttggcagtcggtagctcgccacatcgacccaggccgggtccagcggtcggatcgagggcttggcgatgtcaatgtagggtgttttgtcttgaccgattttccggatcagccccgggatttttcggcccaatttctgtgcgttgttcacccctctgacgatgtagcgatgggccacgcgccgtatagccttgaacagcgacagtcccagcaggaagtcggcgacttcgacggaaaacagaaaaccattcacggctgattcaagggcaatttccgcgttggtccgtgaacggtagtcggcatgggcgagctgaaagcccagctgcgccgaatacaggtacgcatgcagatcaccggtaattggcgtcacggcatagcggtgcgcgctacgggtatcgctgaaaatccgcgccagttcccgtgcatcgccagtggccatgcgctgagtgaaataggcgcgccattcaggtttggccttcagtgcgtcgagttccaccagccccagcaccagttcccggaaaggcgcgttgtcgggagcctgcggggtgtaaaggacacagacgccgcccggcttggtgcctttgcgctggatgaccagtacgccattgatgacctggccgccctggccaccttccaatccgctccccatgaccagtgtgttggcctcgatatcggatcggccgacaggcgggcgggtggtcgagtcgggagactcggtgatcgcttttatccagtccattccaccgccgggcgtcttgaagctgaacaattcgtagaccgccgggttcaatcggctctccagcgcatccttgcgcaatgccgccgcgctcgcccgctgccaggcgctggcaaaggcgcgtccctcgccatggggcaagaaggccgacctgaggtacgcctcgtactgtttgccaacatccgcctgccgggcgagtgcacgtaaatcggcatcctcgagcctgccgcgtttttgccctgaggcgtcgacaatgtcggcgctggcgctgatcgtccggtgcagctcatgggcggaccacgggtcgatattgcgccgggcataactgccgagtgtgcgcaggtccaccacgacttttgcgttccaggtgccgaaggtcagcgtgcgctctggcagcacctgcgggatgtcgatttgcgggtcttcgctgatatacacgacgtcggaggtcgcatcgcgatagcccgtgaccttgacctccatcgaggcgctcacgcgcagcctgaccaggcttttgtagggcgccaggtcgacagcggcatattccggtttttgcagtttcagcaccttgccggtttcctgttcggcaaacacggcaaatggcgcgatgttctccagcaggggggcgagcacttcatggctgtcaatcagggcggtttcgagttgctggtactgttgccggtcggccgggctggccgctgtcagccagtcggggtcacgcggcgccaccaggcgcaggttgcggctcgccaggaccgcggatacatccagttggggcgccaggtcggcggccctgtcgaggtcgccggccagtggcaatggatccttgcgcagggtcgcttgggtattgaagtactgccgcacacgcagtgagtggacctggtctgcaatcacatccgcctcgatcagcggcgggttggtggtcaggatgggcaggctgccaacgttggcttgatcggccaatgacaggcttgcgaccagcttctggccagccgcttcgccgacacgcacgcgtgccgccacggtttcattcaactgccccaagtgctcaaattcctcgaacccttcgcttgggctatagagcatcactcgccccagtggcggtgtgccgcccgtggcattgaggatgaacgcgccggcgaaggcgctgccattctccagtgccagcctgtaggcgccgggtcgctggccggcggggaacagcgtttcccgtgccgccgccgtcgggtatttcaagacgctgtccgccagcgaccgtgcctgcgcggataaggtgccgtccgccgtgcgcaaggccaattgatgggccagtacctggcgacgcaaggcgaccaactgtgcctcggtggtgggttgatcgctctcgcggaatgtccagaactcattgagcttgatcgtcaaggctatttccagcacgccggccagtgtcgcggtcgggctggcgggggacaggcgtttgtcttcctccaccgtatcgctttcccggtagaaggccccgctttcttgtgccagataggcgtctgcgtcggggcttcttaatcgggtcaggagtgagccaagggactcgctgcccagcagttgtttttggccgtcggcgtcttcgcggtagcggttgtagaaaatccgatctggatggatgggccgaggcaagtcgggaaacaccgcggccaattgctgctgatacaccgtctccaggttcggctgctcctggagcagcgcgtcggtctgggcattgagcctggcgagggcctggatgagctgcgtctgctgttggtcgatgggttgatgggccgctggcaccaccggcatggtcacgggttgcaaggggtcgacaggtgcgctgtcgggaggggaggggggtaatgaactgtgcatgtgtgaactcgtatgaagggcgcgtgcggcgcacggctgaatctgagttcggagtctagggttggcgctcaagggcgttgcggtgcatgtgtgtcggtgcggcggcgaccgggagcgatcaattgcctggtgcgcaggcgcgtgtaatccttgccggcttttctcctcaggtgtttattccatgcccatgactatccgcatcgccgctgccctcctgatcggcagcgacggccagaccctgctggtgcgcaagcgcggcacccaggcgttcatgcagcccggcggcaagatcgacgcgggcgagctacctgcgcaagccttggcccgtgagcttcacgaagaactgaacctgcgcattgagcccagtgtcgcgcagtacctcggccagttctcggcaccggcggtcaacgaaccaggctttaccgtgcaggccgagttgttccaggtacatatcgacgtgccggtgactcccgccgcggaaatcgaagaagtccgctggatcgatccgatgggagatggcggcctgcacctggcaccgctgacacgcgacgtgatcctgccgttttaccgagaattgaaaacccggtgatctgcgctcagcgcactgcactgaccccatccagggtcgagaacgaggtgtccttggccgtcagcaggaagtcgcgcatgtacggcgcatccagcatgtccgcgcggatgccggcgtacagggtcgcaaacagacccttttcgcccaggcgcttggccttcacgtaaccgcgcgaactgtactcgtgcaacgcccaatggggcatgccgcacacgccacggccgctggccaccagttgcatcatcatcaccgtcagttccgaggtgcgcacttgggcgggctccacatccgccggctccaggaagcgggtgaagatgtccaggcggtcgcgctccaccgggtaggtgatgagggtttcggtcagcaggtcctgcggcacgatgtaggccttgttcgccagcgggtgttggttggccaccgcgagcatggcttcataggtgaatagcggcacataggtgatgccgggcaactcaagcgggtcggaggtcaccaccaggtccaggtcgccacgggccagggccggcagtggggcgaaggcgaagcctgaggccaggtccagctcgacttccggccacgcgtcgcggaactggtcgatggtcggcatcaaccactggaagcaactgtggcactcgatcgccatgtgcaagcgcccggcggtgccaccggccaagcgcgcgatgtcgcgttcggcgccgcgcagcagcggcagggtggcgtcggccagttgcagcaggcgcaggccggcgctggtgaagcgcaacggtttggtcttgcgcacgaacagcggcatgcccaggcgttcttccagctctttgaactggtgggacagcgccgactgcgtcaggtgcaggcgttcggcggcttccaccaggctgtcggcttcgcgcagggcgtgcagggtcttgaggtggcggatctcgagcacgggttctccatgagcataatttgtgacgaatcggaatggcgtgagtttgtctcatgttgcaagccgtgtcgaccatgaccgttgagcactcttcatcaaactgtcacgcaactgtggcagcgcgcttgaacaaacttcatcagactcgcgctctactggggttctgcgtttcggtgtttttcatgcgcgtgttgtttttactggccgccttagtgttcggcctgccgtcttttgcggcttctcgatgtgatgtcaatgtcccgacccaaacggtcgacctggctcaggtgagcatcgcctaccagagcatcggccgtgcgtccgaccctgccttgctgctggtgatgggcttgggcgggcagttgatccactggcccgacgaggtggtcgtcgccctgtgccagcaaggtttccgggtgattcgttatgacaatcgagacgtcggcctatccacttggcgccaggccccggccaatgccaacctgaccttcgaggtgttgcgctacaagctcggcctgccggtgtcggcgccttacacgctgaccgacatggccgatgacgccatcggtttgatggacgcgttgcaggtccagcaattccacgtactcggcgcgagcatgggcgggatgatcgcccagcacctggccgccatggcgccgcagcgggtcgagagcctcacgctgatcatgaccagctccggcgccgaaggcctgcccgcaccgaatgccgcgctggtgcaactgttgtcgcgacgcagcgcgccgaatcgtgaagtggccctggagcagcaggccgacttgctcgccgcactgggcagcccgaacgtgaaggatgatcgccaggcgctgttgcaccaggcggcgctgtcctacgaccgcgccttcaaccccgagggggtgaagcgccagatcatggcgatcctcgccgaaccgagccgcgtgccgttgctcaaccaactgcgcgtgccgaccctggtggtgcatggcaccgccgacccgttgttgccggtgatgcacggcgtgcacctggcggcgcatatccagggcagtcagttgaagctgattcccggcatggcccatcggttccaggaagcgttcaaggcgccgctgctgacggcggtgttgccgtacctgcaagcccatcgcgaagatgcggcgcattgggcgcagattgacctgggcgagccttcgaaggtgttgtgacattggtgtatcgtgcaacctttacggcgcattactgccagcgaggttgcctgccatgagtactcccctgaaaatcgatttcgtcagcgatgtgtcctgcccctggtgcatcatcggcctgcgcggcctgaccgaagccctcgaccagcttggtgccgacgtgcaagccgagatccacttccaaccgttcgaactgaacccgaacatgcccgccgaagggcaaaacatcgtcgagcacatcaccgagaaatatggctccaccgccgaacaatcccaggccaaccgcgaacgcatccgcgacatgggcgccgggttgggctttgcgttccgcaccgacggccagagccgcatctacaataccttcgacgcgcaccgcctgttgcattgggccgggttggaaggcttgcagtacaacctcaaggaagcgctgttcaaggcgtacttctccgatgggcaggacccgtccgaccacgcgaccctggcgatcattgccgagagcgtcgggctggatatccagcgtgcggccgagattctggccagcgacgagtacgccgccgaagtccgcgaacaggaacaactgtggatctcccgtggcgtgacttcggtgccgaccatcgtgttcaacgaccagtacgccgtgagcggtgggcagccggcggaagcttttgtaggcgcgatccggcagatcatcagcgaatccaaaaaataacgccgaacgcaggtcaaaatgtgggagggggcaagccccctcccacattgctctccattggtcttgagacaggtgctggcccgtcccttgcattgcccctttaaagccttaagggacactgccttgaacattcttgacctcgaccacagcctcaccggccaggcaccgattgcccggcgcctggccagtggccgcgcccaccgtatcgacctgctggacctgggccccaagctgcgcctgtggtccaccgaaaaaacctggaagcgcttcgccgaacgcctggcccaacggcccaggcccatcgacgcacggccggaaattctgtttgtcggctccggcgattatcaccacctcacgccggcattcctggctgatttgaaagagcccatcagcctgatccacttcgacaaccaccccgactgggtgcgctttgcgcccaagcgtcactgtggttcgtgggtcaaccgcgcgctgaagatgccggcgatcaagcgcatcgtcaccctcggcccgtgcagcgacgacctgcacaacccgcaactgcgcggcggcaacctcggggcgctcaagcgcgggcaattgcagttgtttccctggcagcatgcgccctccaaagtctgggggcgggtaggggacggtgccggccaccagcagcaggaaaaccacctgcattggcgcaacctggccgagttggactgggtggcattcctggagcagatgatcggtagcctgcccaccgaggcgatctggatcaccatcgacaaagacgtactcgccagcgaagacgccgccaccaactgggaccagggcggcatgcgcctgactcacctgctgcaagccttgcgcgcgttggcggcgcgcaagcgcatcatcggcatcgacgtgtgcggcgagttcgccacgccggcgttcagcaatgccttcaagcgttgggaagccaagtccgaccagccgccgcccgagcgctggagtcctgaggatctgcagcgcaatgccgcgaccaatgaagccctgattgatctgtttgaggagctgttcccgtgaccttgaccgtggtgttgctggtggcgttttccatcgtgctcgatgtgattggccagctgtgtttcaagatcggcctggaccgtttgccggagttggacggtggttttcgcctgaatgcgttctggggccaggtgttcaatgcgccattgctgtgggcggggatcggcgcctatgccatcgagtttttcgtgtggctcgaagccctctcgcgcgcgccgttgagcctgctgtttccggcggccgcgctggcgtattgcggggtggtgctggcgggcaaggtggtgctgggcgaaaccgtcagccggcgccgttggctgggtacgctggtgattaccttgggtgtgatgttggtggcgattgcagggagtcaggcatgagtacgcaaacgatgaatagcggatggttgcatgggcgtttgggcacggtggtgctgtgggccttgctgatctgcacggaaagcgccggccagttgtttaccaaagtggctggcgaccagttggggcagatggatttcaactggcagtggctgggtgaggtggcgcgcaaccctgggatcctggcggcgattgccagctacatcggcgcgtttttcgtgtggatgctgatcctgcggcgcagcagcctgtccctggcgtttccgctgagttcactggtgttcgtggtggtgttgctgggttcgtggctggggctgggggaacatatcagcccgctgcactgggtgggggtggcggtgattattggtggtatcgccctcctggcagagggcgaagaaaactgagtgcctagggtttgcggtgtgccaccaaaaaccctagaccatgggacaccggaagtgttttgaccccggcctcccgctgctgcccggcaatctcccgatgaaacgccttcactttggtccagtgcatcttcggccggtagtgatgctcggcgtggtagccgttgttcatccagatcaggttgtacaacacactgtaggaactcacgccccaggcgatcggcaggtccgggttgccgccgaaatgctcgtagtagccattgagcgatgacaggcactggccaaggtaccagaacggcaacagccacagcaccgcctgccagttgtagaacgccagcgcgatgtagaacgccacggtcacgccgatctcgaccttgacccagcgcgcatcggccgggcgtttgcgcttcatctcgtcatagaagggcttggggtcgtcgcggaaaaaactcaggaaggtataggcccacgggttttccggctggccatcgtgaccacgctggtagatcgacagcgggtcgatggtcttgccatccggccccggcaggtcggcgttgccacggtggtggcggttgtggatgtcgcggtagagcgtctgggagaaaccgatggtcaccgacagcagcaggtcgaaggcccggttcatggcgcgatgggtgaagtaggcgttgtggatctggttgtgggagatgctgttgatgctccacgacaggctgaccgcgtagagcagcgccagcggcaccagggcccaccagctcaggtgatggaacgcggcaaccagccagacgacaaacgcgaaatgtgccaggcccagggcgatgggcaccaggtcccagagcgagtggtgcagcaggcggtaagcggggcgagccatgaaaagtgtcctgggaaaatggattccaggccttcattgcaaaccccagaccaacctaatcgaacgtgtagctgatcgctgtttgcacctggccctggttcacgtcgccggtctgccggacgatgctgctgtccgctgccgaacccaccagatgtacccagctcgcgctggtcaacaacgaccatttggcagccaggggaaactcgaagctctgcgtcagcgtcacgttctggaagccgccgctggcgttatagggacgaaaaccggtggcggcggcctcgttgtcatccacgccaaaaaacgtgttggtctggcgtgcatcggcaaaatgcgccaccagcccgctgctgccgatgatcccgccacccagcgggtagcccagttcgccgcccagtttgccgagggcgccactctgcgaatgcccaccgcccacggcttgccccaattgcgcgtagacccgccagaaatcagctggggcgtactggacgaagccacctacctcggccatgtccgacacattgcgcaggccctgcagatcgccattggacgtgcgccccgacaggtaattgatataggggccggcggtaaggccgttggtgttgagcgcactccaggtcaaaccgtcatcggtgctcaggctgacgctgccccagtccagatccaggtagggcacgggacggacttcgtagcggctggcggtggggtcatggggctggtaactgaggcctgcacccacttcaccggtgatgccttcggccagtgcagcgtttgaaaagctccacaggccaagcaaaccggcgaatgcagcgcatgtgatcctgtacatggtcacggttccttgattgattacgtgcgcatgaacgcgcgaagggccagcttcacgcaagcactcatcttgtttgtagcaagctacaaaaattgtagcttggaagacacattttgccttcgatacgcgccaaagccccggccctgctgggtgatggccagttggcacagtccctgctctacctctggtgcaagcgcacacagcgcgctcctccaaggtaaacaacgatgatccagtggcatatcgtgtgtgacttcgacgggaccattacccccaccgatgtcatcgacaacgtcctccaacgcttcgccggccccgaatgggaaaccatcgaacaggaatggctggatgggcatatcggttcacgcgaatgcctgagccgccaactggcgctgatcaaggccacaccttccgaattgctcgcgtacttcgacagcgtcgagatcgacccggacttccccgacttcgtcgaccacgtcatgggcctgggcgcgagcatcgaagtggtcagcgacggcatcgagcagggcatcgcccgcatcctgtcgcgcaactacgtgaccttgctgccgatccttgccaaccgcttgcgtcaggtcgaccagaacagctggcgcatcgacttcccgtattccagcgacgcctgccgcgccgcttccggcaactgcaagtgcaagtccaccccacgcaacaagcgggtgctggtgatcggcgacggcaagtccgacatgtgcgtggcctccaccgccgacttcgtgttcgccaagggcagcctcgccaagtactgcgaagccaacaacattcctcacgcacgcttcgacacctttgccgagctgcctgcattgctggcccgactgcctcagggcatcgccgccaacgccaccacctttactgctgctgacaaccaggaactcttccaccatgtctgatatccgtatcgctaccgccgaagaccagatccttctggacaaagaagccaagtattgctcctacggcgacaccgttcactacatcgagccgccgcgtattttcagccgttgcgaaggctcctacgtatgggacaccgaagaccaggcctacctcgacctgcaaatgtggtactcggcggtcaacttcggctacgccaacccgcgcctgaacaacgcgttgaaacagcagattgatacgctgccgcaaatcgccagccagtacctgcacaagggcaagatcgagctgtcggaaatgatcgcagtcgacgccaagaagaagttcggcctcgacggtcgcgtgcacttcaacgtcggcggttcgcagtccatcgaagactccctgaaagtggtgcgtaacgccaccaacggcaagagcctgatgttcgccttcgagggcggctaccacgggcgcaccctgggtgcttcgtcgatcacctccagctaccgctaccgtcgtcgctacggccacttcggcgagcgcgcgcagttcatcccgttcccgtaccacttccgtggccctaaaggcatgaccaaggaagaatacggcagccactgcgtgcagcaattcgcccgcctgttcgagactgaatacaacggcgtgtgggacccgaaagtcggctccagcgaatacgctgcgttctacgtcgagccgatccagggcaccggcggctacgtgatcccgccgatgaacttctatcgcgaattgaagcacgtgctggatcagcacggcatcctgatggtctccgacgagatccagatgggcttctaccgcaccggcaaactgtggtcgatcgaacacttcgacgtacagccggacgtgatcgtgttcggcaaggcgctgaccaacggcctcaaccccctgggcggcatctgggcccgtgaagagttgatcaacccgaagatcttcccgccaggttcgacccactccaccttcgcctccaacccattgggtacggcggtgggcctggaaatgttcaagatgaccaacgaagtcgactacggcgcgatggtcatggccaagggcaagttcttcctcgaaggcctgcaggacctgcagaagcgtttcccgatcatcggcgacgtcgacggcctgggcctggccctgcgctgcgaaatctgcggcccggatggtttcaccccggacaaggcgaccctggactacatggtcgaagaaggcatgaagggtgacatggtggtggacggccagaaactcggcctgatcctcgacgtgggcggttactacaagaacgtgatcaccctggcaccgtccctggagatcagctacccggaaatcgagctgggcctgaagctgctggagcaactgctggtgcgggcgaccaaccggtgaacagcgtcgggatcgacctcggtgaaggtgatgccggtttcgttctcggtgacggtccggtcgggatcctgttgatccacggcctgaccggcaccccgacggagttgcgccaggtcgccaagggcctggccaaggtgggcaattgcacggtgtacgtgcccaccctggccgggcactgcggtgacaacagcgacctgcaggccacgggctggatggactggtacgaaggcgtgcgcaagaccttcgtgcaggtccgccagcgtcacgagcaggtgtttgtcggtggcttgtcgatgggcgcggtgatgtcgatgtatgtcgccgccgaacacccggggcaagtcgccgggctgctgatgtattccaccaccttgaagtacgacggctggagcatcaacaagctggcgttcctcacgccgttgctgatgaaaatcccgttcggcgtgcacatctgccgcttcgaagagaagccgccgtacggcatcaagaacgaacgcctgcgcggcattgtcgagcggcagatgaaggaaggcgaaagcagcgaagcgggcttgctgaccatggagggcatcaccgtgcgcgagctgcaccggatgaacgccgtggtcaagaaacgcatgccgaagatcaacgtaccggcgctggtgttgcactccatcgaggacgacatcaccagccgctggaacgcggactatgtggaacgccacctgggcgggccggtgaccaagatcctgctggacaactgctaccacatgatcaccgtcgacctgcaataccgccgggtgatcgagttgagtgcggagttcgtcgagcagcatgcccaggccatcccggcccctcaagattatcgacagcgggcataagccttaaggacacgatgtgatcaccgcccaagccttcccgaccatccgggctatccagcgcagtgcctggaacgattgtttcccgggtgccctggaggactgggactattacgtcgccgtggagaacgccgccattgatgattttcagtggcgttacctggcggtttatcaagatggaacgctggtggccgtagctgccgcgttcatcacgcattatcgcctcgacaccacggtgtcgggcgccggcaagcgcctgaccgagcgtgtcgagcggctgtggccggggcttttgcaactggggctgtatgccctcggatcgcccgtggccgaacgctgcgacgtgggtttcgccagcagcgtgccggatgcgcagcgtccgctgttgctcaagcacttgctggaggctgcacgccaggatgccgatgactttggcatcggcctggtggcggtcaaggatgcgccgagcaaagacccgcactggctccagagctgccgcgcggcgggcttccagagcatgccgagcttgcccactggcgtgttgccgctgccgtacggctcggtggatgcctacctggggtcgctgggcaaatccacgcgcaaggacctgcgtcgcaagctgcgtgcgccggggccgcgggtggagtggcggcgcaatatcgacgatgtgttaccggaggtcatgcgcctgtacgaagccacgctcacgcgcgccgagttgcagttcgaacggctgcccgccggttacttcaccggcgtactcgaacgcctggatgagcgcgcggtctgtgttctttactgggtggacgagcaactggtggcgttcaacctgatcctggtcgacgaacaccggctggtggacaagtttttcgggcatgacgtggcgttcacccgcgactacaacctgtactttcgcagctggctgaccaatgtcgactactgtattcaacacaatattgcgttgtatgagtgcgggcaggccgggtatgccagtaagctgcgcctgggctgcgagttccagggcaacagtgtgtttttccgccaccgcaaccggctggtcaatggcctgctcaagcttgtaaaactgtttattcgaccggaccgttccgaccctgccatggctgctgcgataagcgaaacctgatgatcaccaagacccgccagaaagcccgcccctttgccatttcgcgctggagcgtccagcgcaagctggtgctggcgttctggttggtcagcgtgatccctaccatgatcgcggccgagctggccgcgaccacgctgtcgcagatcttcgacagcaacgtgcgcatctggctgcaggagtcgaccaagatcgtcaaggacgagatcggcgacatccttcacgacaacgcgcgcatggccaagctgttcctgcgctacaccagcccgccgtcaagccggcgagccgccaagcacgacaggctgaccgccgacattgccgacgcgaccgacatcgacgtggtggcgctgattcgcaccagcgaccacaaagtcgaattcagcaccgccgccgatgacatcgtcaaacagatcaacctgaccaacaatgcggtgttgcagaccgtgcaggtggccggggtgagtaccggcctggtggtgtcgaccttcgagaccagccgtgacggtgtcgactacattctgctggtcgccacctacctggacagcagtttcctcaccagcgtggccgatgtgcattccctcgacctgcgcctgtacctggccaaccccgacggtttctccgagatcttctcgacccagcgttttgtggatcatccctcgcgcatccccaagagcgtcgaaacggcgatgcgcagtacccgccagcccagcgagcagttcaccaataactacagcgggctgtactggccgatcttcaatgatgcgggggatttgcagggcgtgattttcagcggcctgttgcgccataccagcctggtcgggttggtcaaccagagtaatttgttcgtgttgatcttcctgctcagttctgcattgtcactggcggcgggggtgctggtgtcgcggcgcctgaccaaaccgttgcgcgacctgtcccaaggcgtagacgcagtgatctcgggtaactacgaacaccgtgtgctggtcagcggcggcgatgagctggcgcagttgagcagcaccttcaaccacatgaccgaacgcctgggcgagctgcatcaccttgaggcccagttgcgccgacgcgatcgcctgcacgccctgggcgaagtcgccatgggcctggcccatgagatccgcaacccgctgggcatcatcaagacggccacgcaactgttgcatcggcgtgccgacctggcggaaaccgacaagcgccatttggagtacgtggtcagtgaggtcagccgcatcaacgacctgatcaccgagttcctcgacttcgccaagcccaacccgccgttgcgcgtgctgcaaccggcgcgcgcgctggtggacgagatcctcggcttttgcgcgccggaactcgccacccacgcgatcgatgcccatgtcgatgaccaggcgccaggagcgacgatctatgccgacgccaagcagctcaagcaggcttgcctcaacctgattctcaacgccatcgacgccatgcccgaaggcgggcgcctgaccctgggcattcgcacggtggacaacaatacggtgatcagcatcgccgacaccggccagggtatcccggcggacatgatcgaacggatcttcaccccgttcgttaccaccaaggcctcgggcaccggcctgggcctggccaaagtctattcgatcatggaaagtcacgacggcagcatcgaatgcgccagtgagaaagatgccggcgccaccttcagcctgtacattccggcgattggcgaagacgacgaggacagtcatgacgcataacattctggtagtcgacgacgaacccaagctctgcgacctgctggcgtcggccctgggccagaacggcgtgcaggtgttcatcgccggcaacggcctgcacgcgctcaaggtgctggagcaggaagacatcgacctggtgatcagcgactggcgcatgccgggcatggacgggccggcgctgctggccgagatcaaggtgcgctacccccacgtaccggtgatcgtgatgaccgcctacagcactgtgaaaaacgccgtgcagtcgatgcgcaacggcgcctacgactacatcgccaagccgttcgacatcgacgagctggacatcaccgtggccaaggccctgcagtttcgcgacatcatgcgcgacaacgcgcgcctgcgtgccgaactggacgagcacgcacagttcgacagcctggtgggcgacagcccggcgtttcgcaaagtgctgcaagcggtggactcggtgcgcgacagcagcgccaccatcctgctcaccggcgaaagcggcaccggcaaggaaatggtggcccgcgccatccacaaacacggcagccgtgccgaccaaccgttcgtggcggtcaactgtgcagcgatcccggaagggctgctggaaagcgaaatgttcggccatcgcaaaggcgcgtttaccggtgccgtggctgaccgagtagggcgcttccagcaggctgacaagggcacgttgtttctcgacgaagtgggtgacatgccgttggcgttgcaggcgaagatcctgcgcgcattgcaggaacgcgtgatcgagccggtgggcgacccgcgcgagcgcaaggtggacgtgcgggtgattgccgccaccaacaagaatctgctggatgcggtggccaacaaagagtttcgcgaagacctgtattaccgcctcaacgtgttcccgatcccgttgccggccttgcgtgagcgggtggaagacatcgcgccgctggcccgccactttgcccagaccctgagcgccaccgccggcaaacgtatcaccggcttcagcccagaggccttgcaggccatggcggcgtatcactggccgggtaatatccgtgaactgcagaactgcgtggaacgcgcgaccatcgtagcggcctcaccggtaatcgaggatatcgacctgcccggttacctgtttgcgtccaagccgagcgggggcggtgtgaccgccatcctcagcgacgggccgggcattccccaggacctggatgcggcgctggcggaggtggagaaggcctatatcctggcggcgttgcaggagagcaatggggtgcaggcggcggcagcggcgaagatcgggatttccgagcgcagcttctggtatcgcctgaagaagctgggtattcaggtcgacaagatcgtccgctgacacaccgaggttcaaatgtgggagggggcttgcccccgattgcagtgggtcagacagcttttctgtctctgatacaccgccatcgggggcaagccccctcccacagttttgaccgtgttgggtcaggtgtgaacgcggacccagatgctgaccagtatcgtcgcggccatcaaccacgccaccgccgccacggccagtgacgcctccaaccgcatccgatccaccatcacatacaaggtcgccaggtacacgaagtacggaatgatcgaccacatcccgaacaggatcgtggtcttcaaatcgtccaccgagcgccccttgccgacgatgtagtgcgcgatcaacgcaaaggtcggaaacagcggcaccaggcctgcgatgtaatagtttttggtcttggccagcgccgccaggatcagcaccaccgccgcgccgagggcggccttcaacagtaagtccatcagtggctcaacccgtatttcttgaccttgtcgaacagcgtggtcttggccattcccagttcctggctggcctgggtcaggttgccgccgctgcgttgcagtgcatcgttgagcaggttgcgttcgaaggcttccaccgcttcggtgaaggccaggccttggccgccgctgctggcgccgcttttcttgaaggcgggcaggccgagggcgaaacgttcggcgacgttgcgcagttcacgcacgttgcccggccagtcgtggctcatcaggctggacagggtctggttgtccagctccggcgcggtgcggtcgaagcgcagggatgactgctgcaggaagtgttcgaacagttgcaggatgtcttcgcgtcgctcgcgcaggggcggcagttccagggtcaccacgttgaggcggtagtacaggtcgctgcggaattggttggcgcggctcagttcgtcgaggtcggacttggtggcggcgatcacccggcaatccaccgcgacgctctggttcgaccccaggcgttccagggtgcgttcctgcaatacccgcaacaacttgatctgcaggttgatcggcatgctttccacttcatcgaggaacagcgtgccttcgtgggcgtgctcgatcttgccgatgcggcgcttgccggcaccggtgaaggcgttggcttcgtggccgaaaatctcgctttcgaagaggttctccggcaggccgccgcagttcagggcgacgaactggtgggcgtgacgccggctgaaatcatgcaggcaacgcgcgaccaattccttgccggtgccggtctcgccttcgatcagcacgttggccgaggtatcagcgacgttggcgatcaactcgcgcaggttctgcatggccggcgaacggccgatgatgcgaccttccaacgaatcgcgctcggccaattgccgacgcagcgaccagacttcccgtgccagcccgcgctgctccagggcgcggcgcgccacgtcgaccaggcgttcgggggagaagggtttttccatgaagtcataggcgccgttgcgcatcgcgccgaccgccatggaaatatcgccgtgcccggtgatcagcaccactggcaggcttttatccagggccttgagacgggtgagcagctccaggccgtcgatgccaggcaaacgaatatcgctgatcacgatgccggcgaagttttcgccgatgcgcttcaacgcctcttcggcactgcctacgccgacgctgggaatatcttccagggccagggcttgctggcagccgagcagcacgtgagggtcgtcctcgacgatcaacacggtgaggtcttctttaagggctgtagcgtctgtattcatgtcgactcagcttgttgagtgcccgccagcggcaggcacaagacaaaggccgttccaccactggccgggtgttccacggcgagggtgccaccggtggctgccgccaggctggcggacagcgtcaggcccaggcccaggccttgctcgccgggcttggtggtgaagaacggttcgaacaaatgcttgcgcgcctcggggtcgatgccgtggccattgtcgcgcacttgcaggcggtatttgccctcgctgctgctgccttccagccacaactgcggggccggttgggcttgcatggcgtcaagggcattgccgatcaggttgaccaggatctgttccaggcgtgtctggtcgatttgcagttgggcgtgggaaaagtcgcggtgcagcgtcagcggcagactgtccaggcgtgcgccgagcacctggaacgcggcgtctaccgctttggccaggctggcttcgccctgatcgtctccgcgtcgggcgaaggagcgtaggctggcggtgatgcggcccatgcggtcgatcagttcattgatggtcttgagattggcgctggcggtgtccagcgcaccgcgctccaggaagcgcacggtattgccggacaaggtgcgcagcgcggccaggggctgattcaattcgtgggcgatgctggtggacatctggccgatggccgccagtttgccggcctgcaccagttcatcctgggcacggcgcagggtttcttcggcctggcgccgttcgcggatctggcccttgagccgttcgttgctggcgcgcaggtcggcggtgcgctcggcaatccgtcgttccaactggctgttggcttcctgcaaggcttcccgtgccgcgaggcgggtggcgatgactttgcgtcgctcgttccaggcaatcagcaaaaacgccaccaggccaaacgcaacggccaccaggatgccctggttgatcgcggcgcggcgcaggtcgttgagcggggtgagcagggtgaaattccacggcgtgtcattgagcgggcgggtttgcgccaggtagctgacttcgtgggcgtcgttgaccacttcgctgttggccgggaaggtcagtttttcggtgccttcgttgaggtgctcgcgggccaggggttccaactcgttcagtgtcgcccagtaatattgcaggctgtgggccaggcggtccttggtgtcatcgctcagcgggcgcacggccttgaggcggcgggccgggtcgctggagaggatgatgataccgttctcatcgctcacgaacgcttcgaggcgtgcgcgctgccagcgctcttcgagggcttcgaggcgcaccttgaccaccgcgacgccgatgatcttgccatgctcttccaggccgtgggccaggtagtagccgggttcgccgttggtgctgccgatgccgtagaaacgacccggctggccccgcacggcgttctggaaataggcgcggaaggacaggtcttcaccctggtaactgtcggcatcgcgccagttactggtggccagcacgcggccggtggtgtccatcacgtagatggcccgactacgactgcgtcggttcaggccttcgaggtaatcgttgacggtcttgcgggtttcctggttcgggtcggccagcagcgtggaaacgctggactccagctccagcaggctgggcaggtaggtgtacttgctcagttcgctttcgacggtgcgggcatgcaactccaactggcgttcgccggtgtcgctgagggtgcggataccgtagtactcactgacccagaagccgatgaaacccaggccgatcatcagggcgatgatcaggggcggcaggaacagttggcggatcaggcgtggtttcacggcaagtgatggcggtgcggcgcgaaattggttggggtcgcatttcatcacagatgccttgggtcaaccagagctgccagcctgtgcgggccaatgtgggaggcggcaagccccctgccacattggcccggtttccacagtcggcgctatgtagtgcttagtgctgcaggattttctcaaggaagtgctgcgcgcgttcggagcgggcgctgatgtcgccgaagaactcttctttcgggcagtcttcgatgatcttgccggcgtccatgaagatcacgcggtcggccactttgcgggcgaagcccatttcgtgggtcacgcacatcatggtcatgccttcgtgggccagttgcaccatcacgtcgagcacttcgttgaccatttccgggtccagcgccgaggtcggttcgtcgaacagcatgacgatcgggtccatggccagggcgcgggcaatcgccacacgttgttgctggccgccggagagctggccagggtgcttgtgcgcatgggccgacaggcctacgcgctcgagcagttgcaggcctttcttggtggcttcttccttgctgcggccgagtaccttgatctgcgcgatggtcaggttttcggtgatggtcaggtgcgggaacagctcgaagtgctggaacaccatgccgacgcgcgagcgcagttgcggcaggttggtcttagggtcggcgatggaggtgccgtcgaccacgatgtcgcccttctggaacggttccagcgcgttgacgcacttgatcagggtggacttgcccgagccggacggcccgcacaccacgatcacttcgccttttttaacctcggtgctgcaatcggtcagcacctggaagtcgccataccacttgttgatgttcttgatagagatcatacggcaaaccttttttgcagacgcttgaccagcagcgaggcggaaaagctgatgatgaagtagacgacaccggcgaagatcaggaactcattggagcggccgatgatgtcgccgttggagcgggcggagttgaggaagtccaccaggcccacggtgtagaccagcgaggtgtcctggaacaggatgatcgactgttgcagcagcaacggggtcatcttgcggaacgcctggggcaggatgatcaggcgcatggtctggccgtaggtcatgcccatggcctgtgccgccgccatctggcccttggggatcgactgcacgccggcccgcacgatttcacagaagtacgcggcttcgaacatcatgaaggccacgacgcaggaggtgaacgcaccgatcggggtgtcttcgccggtgatccagcgcaatacgaacggcaccgccaggtagaaccaggtgatcaccagcagcagcgggatcgagcggaagtagttcacataagcgccggcaacgcgcgacagcagtttgctggacgacaggcgcatcagcgccaggaccgtacccagcgcgataccgccgaccacgcccatgaccatcaactgcagggtcatgaccatgccgttccacaggcccgggatggcggggatgatgccgctgaaatcgaagtccattatttaccccccacggagatcaggccgggcactgcgactttcttctcgaccacgcgcatcagcaacatcaggctcatgttcagggtgaagtagatcagcgtagccagggtgaaggcttcaaacaggttggccgagaactcggcggtctgtttggtttgcgccagcagttccatcaggccgatcaaggacgccacggaggagttcttgaagacgttgaggaattccgaggtaagcggcggaatgatgatccggtaggcctggggcagcagcacgttccagtagatctgcggcagcttgaagcccatggcgcgtgcagcggattcctggccacgtggcagcgcctggatgccggtacgcacttgttcgcacacacgagcagcggtgaacaggcccaggcacacgacaacgctcaggtaggccgaggtggtcgggttgaggtcctgtttgtaccagtcctgcaggttctgcggcagcatgtcgggtaccaggaagtaccagatgaacagctgaaccagcagcggcacgttacgaaacagttccacgtagcaggtcgcgatgcccgatacgatgcggtttggcacggtgcgcatgacgcccagaatggaccccagcagcaaggcgataatccatgccacgacagcgatggcgatggtccagcccaagccggcgatgtaccagtcgagataagtctcgctgcccacgccagtggacttgaagaacacgccccagtcccagttgtaattcattagggtctcccctcgaaatcgatcgatgtacaagcacccgcttggggaagatcctttcccgcccggcggtgaacgccaggcacacgcgatcggctcgaaaaccgccaggtcgagtgttccacaataaagccagcaggtagtaacagacgcctgagggaggttggctccctcaggagataagcttagtcaggtatcagatttttacgtcaggggctggtttgtcgcttgggttagcgatcagctccttcaccttgtcgctcatcgggaagttcaggttcaggccttttggtgggatcgggctctcgaaccatttgctgtagatcttgttgatttcgccggatttgtacagggcaacgatggcgtcatcgacagctttcttgaagtcaggatcgcctttgcgaaccatgcacgcgtaggcctcgaaggactgtggagtaccggtgatgacccagtcgtccggcttcttggccttggcttcttcaccggccagcagggcgtcgtccatcatgaatgcgacggcacggccgctttccagcatctggaaggattcgccgtggtctttggcggagatgacgttcatgcccatctgcttgtcggcgttcatcgccttgatgatgcgctcggacgtggtgccagcggtggtcacgacgttcttgcctttcaggtcggcgaagtcagcgtaggacggcttgccatccttgtctttcttgaccagcaggcgggtgccgatttcgaagatgttgacggtgaaatcaacttgctgggcgcgttcggcgttgttggtggtggagccgcactcgaggtccgcggtgccgttctggatcagcggaatacgagtttgcgaagtcaccaggttgtacttggccttcaggtcgggcttgttcaggtcttttttcagggcttcaacgatagccagctgaatgtcgtgggagtagcccacaggtttgcccgaaccatccgcgatgtaggaaaacggaatggagctgtcgcggtgagcgagggtgatggtgccggagtcgttgattttcttcagtgtgccggtgagttcggcggcgaaaactggagtgctgatcagagcagcagcgatagctgcgcccaggatatggggaacgatgcgcatcaatacttcctcgacatttgttttttttatgaagccggctaaacggctctcttgtacagcgaatgcccgtgacggctcctgaggcgtctcaggcaatcgtcagggagtgtagagcatgagtcgtgccatacctcgaataaaaggttatctatttgatttataaaggtattaaatttttatttcgaagaatttgtcacgccgtgatccggcaatccgaataggctgcggtatggcgttcggaaaaccgaatagggggtgtgggatttatctggcataaaaaagcccctggacctttcggtgcaggggcttttcaaggcgacctgatcaggccgcttcaatctttgcgcgggtttgctcgaccttggacaggtaacgttgcacgttgtcctgttcttccggggtggtgaacaagccgagcttggtacggcgccacagcacgtcgtggggttgggtcgcccactcttcggcgcacaggtaatcgacttcgcgggtgtacaggcctccacccaggtggtcacccagatcggccagcgactgcacaccttcgagcagtcgccaggtgcggctgccgtaagtggtggaccaacggcgggcgatctcgctcggtatccagtcgaacttgctgcgaatcgcttcggccagggcttctggcgtcgtcatgttttcaccgcccggcaggctggctgtggcggtccagcttgggcgcatctgggtgaagtacggtgccagttgcgccatcgccgactcagcgagtttgcgataggtggtcagcttgccgccgaacaccgacaggatcggcgcttcgcccgtgccaccggacagtgccagggtgtagtcgcgggtgatagccgacgggttgtccgactcgtcgttgcacagcgggcgcacgccggaataggtatgcacgatgtcatcgcgactcagttgtttcttgaagtgcgcgttgaccactttcagcatgtagtcggtttcaccttcggtgatcgcgacttttgccgggtcgccggtgtattcgcggtcggtggtgccgatgatggtcaggtggttcaggtacggaatcgtgaagacgatgcgctggtcttcgttctgcaggatgtgcgcgtgggcaccttcgtacagtttcggcacgatcaggtggctgccctggatcaagcggatgccgtagggtgaatccagcttcaggtcgtccttgatgaacttggcgacccacgggccggcagcgttcaccaaggcgcgggcgcggatcgagaacaggctgccgtcggcgcgttccatgttcatgtcccacatgccgttgctgcggtgtgcgctgatgcaacgggtctgggtatggatgtgcgcacctttttcgcgggcggccatggcgttgagcaccacgaggcgggcgtcatcgacccagcagtcggagtattcgaagccttgggtgatttcactttttagtgggctgtcggcgccgaacttgaggcttttcgaaccggcgagcttttcgcgcttacccaggtggtcgtacaggaacagaccggcacggatcatccacgccggacgcaggtgtgggcggtgcggcagcacgaagcgcatctgcttgacgatgtgcggggccttggccagcagcacctcacgttcggccagggcttcgcgcaccaggcggaattcgtaatgttcgaggtagcgcaggccgccgtggatcagcttgctgctggcggaggaggtgtggctggccaggtcgtccttttcgcaaaggaataccgacaaaccgcgcccggctgcgtctgctgcaatgccgacgccattaatcccgccaccgataacggcaacgtcatagacttcggcaagcggtggagcaggcaaggtagaagggttcatcggctggcctcgcgatctttttcgtattggaattcgaacattaatgttcatttgcgaaaatggtagctgataaacgcgcgcgcagccacctgacttcgattgaaaaaactcatcgaagcggcgggaaaggaaaatttgtgaacatgagccagtgctggctggagaaatgggtggtcaggtaaatagcgatcgggggcgagccccctcccacaggttgatcgcattccaatgtgggagggggcttgcccccgatggcgtcagtgcaggcgctacaccacttccagacgaaccttgtggtcattgagcaactgcaccaacgccggcaccggctgttgatccgtcaccaggcaatccaccaggctgatcggccccagacgaatcatggcattgcgcccaaacttgctggagtccgccgccaggatcacctggcgggcgttggcaatgatcgcctgggaaacccgtacttcctggtaatcaaagtccagcaggctgccgtcttcatcgataccgctgatgcccaccagagcaaagtcgaccttgaactggttgatgaagtcgacactagcctggcccaccacacctccgtcacgccgcacattgccacccgtgagcaacacatcaaagtcgtccttggcactgagcatggtggcgacgttgaggttgttggtgataattttcagatggttgtggttgagcaacgcgcgggcgatggattcggtggtggtgccgatattgataaacaacgaggcgtgatcggggatctgcgcggcgatggcttcgccgatgcgctgtttctcgtcgcgcatctggtcggcacgcatggcgtatgcggtgttttcgacactggagtcataggccgcgccgccgtggtagcggcgcagcagattggcgtccgccagctggttgatatcgcggcggatagtttgcggggtaacaacgaagagctgcgccatttcctcgatactgacgtagccgcgttcgcggaccagttcgaggatttgttgttggcggggaggcagattcatggggcgtcctttgggctgccatacaaaagtggcccatgatgacgcaggaatccgctccctgccagttacaaccctatatgggtccggcgcttggcttattcagcgccttcgtgcggctcccagtcacgggtgcggctgaccgctttttgccagccagcgtagagtttttccttggcggcttcgtccagttgcggttcgaattcgcgctcgatcaccgccttgccgcgcagctcgtccaggctgccccagaagccgcacgccaagccggccaggtaggccgcgcccaacgcagtggtttcgcgcatttgtgggcgctcgacctgggtaccgaggatatcggcctggaattgcatcaggaagttgttggccaccgcgccgccgtctacgcgcaacgccttgaggcgctcgcccgaatcctgctgcatggcgtcgagcacgtcgcgggtctggtaggcaatcgactccagggcggcacgaatgatgtgatccacgcgtacgccacgggtcaggccgaacagtgcgccacgggcatacgggtcccagtacggcgcgcccaggccggtaaacgcgggcaccaggtacacgccgttgctgtccttgaccttgccggcgaagtattcggtgtcgtgggcgtcgttgatgattttcagctcatctcgcagccactgtacggtggagccgccattgaacacggcgccttccagggcgtaagccacttcgccacgcgggccgcaggcgatggtggtgagcatgccgtgcttggatttcaccgctttgtcgccggtgttcatcagcaggaagcagccagtgccgtaggtgttcttggcctggccggcttcgacgcacatctggccgaacagggcggcctgctggtcgccggcgataccgccgatggcgatgccgcttttggtacggccgtagatttccgaggaggacttcacttgcggcagcatttcgcgcgggacgtcgaggatctccagcatcttcgcatcccactccagggtgtggatgttgaagagcatggtgcgcgaggcgttggtgtagtcggtgacgtgggtcttgccgccggtaaatttccagatcagccagctgtcgatggtgccgaacagcagttcgccgttgcgcgcacgctcgcggctgccttcgacgttgtcgaggatccacttgagcttggtgccggagaagtacgggtcggtgaccaggccagtggtgtcattgatgtattgctcgtggccatcgcgcttgagctgctggcagatctcggtgctgcggcggcactgccagacgatcgcgttgtagatcgggcgaccggtgactttgtcccacaccacggtggtttcacgctggttggtgatgccgatggcagcgacctggtcatggtgcaggccggcctgtgccagcgcttcgaccatcaccgcactctgggtggcgaagatttccatcgggtcatgctcgacccaaccggcttgtgggtaatgctgagtgaattcgcgctgggcggtgcagaccacgttggcgtcacgatcgaagatgatcgcgcgggaactggtggtgccttggtctagggcaatgatgtagttcttattctgaatatcggtcatgtcgaatgccttggaaaataagaaagtcggtaatcagcctggggcgcaagaagggcaggtgcgtccaggccggcgctatcaggaaatacgggtcttgccgttgactgccgtgtcagatgtttcttcagctgtagcaggtgcggcgctcggcaggtggcgggcaatcagcccgcgataggccgcggcgccgaggcatgcgccgacaatcggcgcgaaaatcggtacgaggaagtaaggaatatcgcggccgccagtgaaagccatttcaccccaaccggcgaaaaaggtcatcagcttgggcccgaaatcccgtgctgggttcatcgcaaagccggtcaaagggcccattgcgctgccgatcaccgcgatcagcaggccgatcagcaggggggccaacgggccgcgtggcaggccgttgttgtcatcggtgagggccatgatcacacccatcaggatggcggtaatgaccatttccaccaggaacgcctgggcggtgctcagcagcgcatgggggtaggtggagaacaccgacgccagttccaggctggcctgggagccgcgcaccatgtggtgggtttgttcgtaatcgaaaaacaggttgctgtagagcgtgtacaccaaggccgccgagcagaaggcgccggcgatctgggcgagaatgtagaagggcagtttgcgcttgtcgaagtcggcgaaaatgcacagcgcgatgctgacggccgggttgaggtgggctccggaaatgccggcgctcaggtagatcgccatgctgacgccaaccccccagatgatactgatctcccacaagccaaagctggcacccgcgaccttgagcgcagcgacacatccagtaccgaagaagatcagaagcgcagtccccaggaattcggccatgcattggctcgaaagtgaaggctgttgaagagcagttgtcatggaaaacctcagttgttgttcttgtctggcgcacaacctcaacgggttgttgcgcgattttcaccgtgccagggatccccatcccggacgcggcttactgcttgaacgctgcgggactattcctacagtattcggaaacgaaaaaatatagacaagaatgacggctgtcaaaggtcgaaagtgaaccgtcagtcactttcaaactattggtctggtgaatgatcacgcttgtcacattgcgtgtgtacggcaagagtgggcggactagagcgttttacgtgggcttggcctagaattggccatctgtttgccacgcctcggagacaccatgacgcccgcattggacttgttgaaaaaagttcgcgccgaacatcgcatccacagttacgaacatgaccccaaggcggcttcgtatgggctggaggccgcggaaaaattgggcctggaccctgcgcaggtgttcaagaccttgctggccagcagcgagaaaggcgaattgttagtggcggtggtgccggtcgtcggaagtctggatctgaaagccctggcgcatgcggcaggcgtcaagaaagtcgaaatggccgaccctgcggcggcgcaacgttccaccggttacctgttaggcggcatcagcccgttggggcagaagaagcgtttgcgcacgttcattgatgtgacagcgcagccgtttgcgacgatttttgtgagtgcggggaggaggggcttggaggttgaattgccagcggcggtgctggctgagcatacccaggccaagttcgcggaaattggccgggcatgacgaggttttataccgggctgtagcgtcgtacgccggattcgactggagggatgtgtgcggccgtgctgccggacgcctggaacaacaccaggtgttcggcggccacccgaatgcccacatctgcaccgacctgatgatcggcatgactcgggaaaatcgactccagctgcgcgccggtcggcagctgcaggcggtacagcgtcgatgcaccgaggaaggtcttgccgacgatccgcgctttcaacccgctgtccggcgcgtagacgatgtcatccggacgcagcaacacatccaccgcaccgccggtaggccaggtgtaggcgcggttgccgcgcaactcacccagttcggtgctgaccgattccggcgaactcaattgcccacgaatgaagtagccctggccgataaagctggcgacgtagggcgtctgcggctcgtgataaaggttgtagggcgtgtcccattgctcaaggcggccttctttgaacacgccgacctggtcgctgacggcgaaggcttcttcctggtcatgggtcaccaggattgcgctggtgccgcgggccttgaggatgtcacgcacctcgtggctgagcttgcgtcgcaactcgccatccaggttggagaagggctcatccagcaacagcaaggccggttctggcgccaaggcacgggcgagggcgacgcgttgttgctggccgccggacagctcatgggggaagcgcttgcccaggtttttcaggtttaccagctccagcaactcggcgactacgcggtctttttgcgggtgcttgcgaatgccgaaggcgatgttatcggccacgctcaggtgaggaaacaacgcgtagtcctggaacaccatgccgatgcgacgtttctcaggggccaaggtgaacccggcactggagatcacttcgccagccaggctgatttcaccttcgtgcaccggctcgaacccggcaatcgctcgtagggtggtggtcttgccgcagcccgaggaacccagcaggcaaccgatgtcgcccgcattgaggtgcaggttgaggttctgtaccacccgttgatcttgatagccgcatgccaggttgcgcaggttcagcagtaatggatggctcatgcgtggtggtacgacggtgggacgaggaattcgagcaaggccttttgtgcatgcaggcggttttcagcctggtcccaggcgaccgagcgtgggtcatcgagcaggtcggtgctgatctcttcgccacggtgggccggcaggcagtgcatgaacaacacatcaggcgcggccaggtcgagcagggcgcgggtcacctgatacggggcgaacaaggccaggcgcttggcggtttcgtcttcctggcccatggaggtccagacgtcggtgcttaccaggtgcgcaccgatcaccgcgtcatgcgggtcgcgtaccagggtcacgcggtcgccggcctgctccaggaagcgcgcgtcaggctcgtagccttccgggcatgcaacgcgcaattggaagtcgaattggatggccgcttctatatagctgttgcacatgttgttgccgtcgccgatccaggccacggtcttgccctggatcgagccacggtgctcaaggaaggtttgcatatcggccagcaactggcacgggtgcaggtcatcggacaggccgttgatcaccggtacacgggagttggcggaaaattcggtcacggtgctatgggcaaaggtacggatcatcacggcatcgagcatgctcgacatcactttcgcgctgtcggcgatcggctcgccacgacccagctgggtgtcgcgcgaggacaggaagattgcctggccacccagttggatcatgccggcttcgaacgatacacgggtgcgggtcgacgacttctcgaagatcatgccgagcacgcggtttttcaaaggctcgaacagtacgccgcggttacgcaggtctttaagctcaatgcctcgacggatcacgctgaccagctcttcgggcgtgcaatccatcagggagagaaagtgccttgcgctcatcattaactacctttttgcaacagaccgcagatactcaaagccttgtttattgtgacaacgggcgagacctgcggcgaaagccgcacggggcgacgaaataggggaaggcgcgatcttataattaaatgtcgcgtcttaccaatagggctacggtttttaagggtgttcaagcagggcgccgaagcgcttttgaagatgaattccagacagcagcgggccatttgtacactggcgtcgagaccttttgcaatgtgcggaggcgggcgcaggccaggctgcgtcggtttcagaggctgtacgccgggttttgaaacatttgctcacgcttgcccatggcctggcctgatgctggtcgattcacaggacgaacgttggtggcgcccctgccgctcccggcccatagtgggatcaaagcccctataaaagagactggccatgaccaagactctccaccaccgtgcctgccatctgtgtgaagccatttgtggcctgaccctggaaaccacccaggccgacgacggcagcctggcgatcacctcgatcaagggtgacgcccaggacagtttcagccgtgggcatatctgccccaaggccgtggcgctgcaggatatccagaatgacccggaccgcctgcaccagccgatgttgcgggtgggcagtgaatggcagccgatcgcgtgggacgaggcgtttacccttgtcgccgaacggctggcgggtattcaggcgcggcacgggcagaatgcggtggcggtgtaccagggcaatcccagcgtgcacaactacgggctgatgacccacagtaattacttcctgggccagttgaagacgcgtaatcggttctctgcaacctcggtggaccagttgccgcatcacctcaccagttacctcatgtacggccatggcctgctgttgccaatcccggatattgatcacaccgacttcatgctgatcctgggcggcaacccactggcgtccaacggcagcatcatgaccgtgccggatgtggagaagcgcctcaaggcgatccaggcgcggggtggcaaagtggtggtggtcgacccacggcgcagcgagacggcggcgatggccgaccagcacctgttcgtgcgcccgggcggtgacgcggcgttgctgttcggggtgctcaacaccttgtttaccgagcacctgacccgcgacagccatttgccggttgaaggtcttgaggatgtgcgtcgcgccatcgccgggtttagtgccgaggccatgagccgtcagtgtgcggtgcctgccgaacagatacgccaactggcgcgggactttgccgccgctgataaagcggtgtgttatggacgcatgggggtctcgacccaggcgttcggcaccctgtgccattggctggtgcaactgatcaacctggtgaccggcaacctggaccgcgtgggtggtgcgctgtgcaccacaccggcggtggacctggtggcatcgaccggtggcgggcatttcaatcgttggcagagccgggtttccgggcgcccggagtatggcggcgagcttccggtgtcagcattggccgaagaaatgctcaccgaaggtgaaggacaaatccgcgccttggtgacggtggcgggcaacccggtgttgtcgacacccaacggccggcagttggaacaagccctcgacggcttggagttcatggtcagcatcgacctctatatcaacgaaaccacgcgctatgccgacctgatcctgccgtccacttcggcgctggagaatgatcactacgacaccaccttcaacatgtttgcggtgcgcaatgtcacccgcttcaatcgcgcaattctgcccaagcctgcgggcgcactgcatgactgggaaatctttgtcggcttggccaaagcgtttgccgcgcaaacaggcacggtgctcaagccgaccctgccgcccgcgcagatgatcgacttcggcctgcgtgccggagtgtacggtgatgcgtccagccacaagttgtcggtggccatgctggcggaccatccccatggtgtggacctgggggcgctgcagcccaatctcgccgcgcgcttgaaaaccgttaatggcatggtacaagcagcgccagcggtgattcttgccgatctggcacgttttgccgcgcagccggtggcggtggccgacgaactgctgttgatcggccgccgccacgtgcgcagcaataattcctggatgcataattaccatcggctggtgaagggcaagccgcggcatcaattgctcatgcaccccgatgacctggccagtcggcagttgaacgacggtcagcgcgtgcgtgtgagttctcgcattggcatgatcgaagtggaggtcgtggccagcctggacatgatgcccggtgtcgtcagcttgccgcatggttggggccatggccgccccggcgtgcagatgacgattgccagcggacagccgggggcgagtgccaatgacttgaccgacgagcggcagttggatgagctgtcgggcaatgccgcactcaatggcgttccggtgcaggtagcagccgcctgagcaccgcgctggaaatttgcgttacaatgcgccaccgtgccgacctgtgagtcgcaaagttccagccgaggtgttccatggatatcatcgaaacgatcaaagagcagattgccaacaacaccattctgctttacatgaagggcgcgccaaacgctcctcagtgcggtttctccgcgaaggcttcccaggccatcatggcgtgcggcgagaagttcgcttacgtggatatcctgcaaaaccctgaaatccgcgccaacctgccgaagtacgccaactggccgaccttcccacaactgtgggtggccggagagctggtcggcggcagtgacatcatcgttgagatggcggctgatggttcgttgcaaacgctgatcaaagaagcagcggcaaatgcggcagccaagaccgacgcgtgattcgcctgcaataaaaagccccgcctctcgagagagagcggggcttttttgttcctgcgagctgcgggcttattcttcgcccatctgcgattgcaggtagttttccaggctgaccttgtcgatcaggcccagttgggtttccagccagtcgatgtgctcttcctgatcttccaggatgtcttccagcagttcacggctgccgaagtcgctcttgatttcgcagtgagcaatagcggccttgaggtcgctgtggctcttgcgctcaaagcccaggtcactgccaagcatctccttggtgtcctcgccgatgttcagcttgcccaggtcctgcacgttcggcaggccttccaggaacaggatgcgcttgatcagcgcgtccgcgtccttcatggccttgatcgattctttgtattcacgcttgcccagcttttccaggccccaatcgtcatacatgcgcgcatgcagaaagtactgattgatcgcgaccagttcattggcaaggattttgttgagttgctggatgactgagatgtcgcctttcatgactggggtcctgccctgtaatagctgtgtataaggcggagtttgagcggcagaacccttagtgtcaaacctaagttattgaataataaatgaaaattaatcggaataagaatgtttgtgttccgcgtcttagcgctaacttattgaattgcgggcataaaaaaaccggacactaagtccggttctttaaaacatgccaatcaggcgtgtgtaaattctgctgaataggggagcgcggcctgagcggtctgcagctgtgtcagggtttcccgtaccacttgcttggccaggcaagcacatttgccacactggctggcaacgccggtagcttcacgcacttccttgtagctgcagcaaccttcatagattgcttcgcggatttttccgtcggtgacgccagtacacaggcacacatacataagggagaaccgtcgcgggtttaaggcttaagtgcggtggatcttaatgttaacgagaatgattgtcaaagtagaatcgtagggtattcgctggcaccgtgcccgcactgacgaacggttttttcagtgtatgatggtcggtcttcacgaagcgtgactgcgtcacggggctgtcgcttatcaacggcagactcagggccggtccttttacttcaatcgtcaccctcacatcaggagataaccaatgagcgtactcgtcggcaaacaagccccggatttcgacgtacctgccgtcctcggcaatggcgaaatcgtagacagcttcaaactgtctgaagccatcaaaggcaaatacggcctggtgttcttctacccgctggacttcaccttcgtctgcccttcggagctgatcgctctggaccaccgcatggacgatttcaaggcgcgtaatgttgaagtggtagccgtttccatcgactcccatttcactcacaacgcctggcgcaacaccgccatcaatgatggcggcatcggcaaagtcaaatacaccatggctgccgacatgaagcacgacattgccaaggcctacgacgttgagtccgaaggcggcgtggccttccgtggcgcgttcctgatcgacgacaaaggcgtggttcgctcccagatcatcaacgacctgccactgggtcgtaacatggaagagctgatccgtctggtcgacgccctgcaattccacgaagagcacggcgaagtctgcccggccaactggaaaaaaggcgacaaaggcatgaacgcttcgccagaaggtgttgcggcttacctgaccgagaacgctggcaagctgtaagccacgtttgcggcaaaaaaaaaccggcctgagaaggccggtttaatgagatggtcacccccaacaccctgtgagggctacgctttcacagggtgttttgttttcggaggccatcatcatgagcgagtcagcactgatcgggatcgatctcggcaaacata

SEQ ID NO: 25 - DNA, 270935 bp, Pseudomonas nodulensis
cgactctcatcgtggcgctggggcaagccccaaacagacgccggatagatttaagcaagccaaccacaccacccgttaatcagtattgcaaaaatgggggtgaccatagatttttatgcgcgggattccacttcagtcgttgaagtcttcccagccgcccatctgcttccagcggttgacgatgccgcagaacagctcagccgtcttctccgtgtcgtaacgggccgagtgagcctcacgaccgtcaaagtcgataccggccgcctgacaggctttcgccaacacagtctggccatacgccagcccggcgagggttgcggtgtcaaagctggagaacgggtgaaacgggttgcgcttcatgtccaaccgcgccacggcggcattcaggaagcccaggtcaaagctgctgttgtggccgaccaggatcgcgcgtttgcagccattggccttcaatgccttgcgcacgccacggaagatatcggtcagtgccgcttcttcacttactgccatacgcaatgggtgatcgagcttgatcccggtgaactccaaggcagccgcttcgatattggcgccttcgaacggctcgacgcggaagaagtgggtgtgttccgggaacacaaaaccctgttcgtccatgccgatagtcgtcgcggcgatttccagcagcgcatcggtggcgcagttgaaaccaccggtttctacgtcgatgacaaccggcagatagccgcggaaccgctcggccatcggatgacgggatccgccaccgctgtgctcgtgttcgtcatcgtaatggtcttcactcacttgctttcctccagcaggcgccagcgcagtgtttcaccggcgcgcagcgggatgacagtcagctcgccaaacggcaggcttgcaggggcggtccagtcttcacgaaccagggtaatgcgatcggtattcgcgggcaggccgtagaaacgcgggccattgaggctggcgaacccttcgagcttgtccagggcgttgcgctgttcgaacgcttcagcgtacagctcgatggcggcataggcggtgtagcagccggcacaaccgcacgcggcttctttggcgtgctgggcgtgaggcgcggagtcggtgccgaggaaaaacttcggattgccgctggtcgccgcatccagcaaggctacctggtgggtgttgcgcttgaggatcggcaagcaatagaagtgcggccgaatcccgcccaccagcatgtggttgcggttgtacagcaggtgatgcgcggtgatggtcgcagcaacgttggccgaggcttcggtgacgaactgcacggcatcggcagtggtgatgtgctcgaacacgaccttgagggtcgggaacagctccaccacgcgacgcatgtgttcgtcgatgaagatcttctcgcgatcgaacacgtccacatcgccacgagtgacttcaccgtggatcagcagcggcatgccgacgtcggccatggcttcgatggccggcaggatcttatcgatactggtcacgccggaatcggagttggtggtggcgccggccgggtacagtttggcggcgtgcacaaacccactggccttggcctcgcgaatttcttcgggctgggtgcggtcggtaaggtacagcaccatcagcggttcgaaccggctgccggccggccgtgcagcgaggatacgctggcggtaggcatcggcttgctcggcgttacgcaccggaggaaccaggttaggcatgatgatggcgcggccaaaggtacgcgctacatcggccacggtgtggggtaacgcagcaccatcgcgaagatgaatatgccagtcgtcgggacgcagcagggtcaggcggtcggacattggggattccaggcgggtcaatctggggggaatgctaccggaaaagactctatcaggcactcgctatcaagttttgcaggatgcaaccgatagccttttgtatgccttatcgatgtatgacgctttgaagtgttgtagaaaccagtggagcctcccgtgcgccagcattacctagccctgctcagtgtgttcgccagcctgcccgcgatggccctcacgttccagacacgtctggagaacattgagtggaaggtagagggcgaccagttcgagtgccgtctgacccagccgatcacagacttcggttcgggtgagttcgtgcgccgggcgggtgagcaggcaatatttcgtctgaaagcctataacggttcgctgggcacaggctcggccaccttgttggctgccgccgccccttggcagccaggccgaggcgatatcaacctcggcgccgtgcgtgccggtagtggcgatgtgttgttcaatagctcgcaggcccaggccggtcgcctgttcaccggactgctggaagggcgcagcccgacggtccgccactacggccgtgaaggcggctactccgaaatccgcttgttgccggtgaaattcaataaggcttataacgactaccagctgtgcaccgccaagctgttgccgatgaattacgatcaggtcaaacagaccgaagtcggattccctggtggcggtatcgagttggacgcagccgccaagaagaaactcgacgtgattcttgcattcatgaaagccgacccgacggtcaaccatatcgagttgaatggccattcggacaacagcggcaaccgcctgaccaatcgcgacgtctctcgccgccgcggcttggcggtgatggactacttcaaggccaacggtatccaggaatcgcagatcaccctgcgcttccatggcgaaagctacccccttgcgcccaacaccaatgcggccaaccgggcacgcaatcgtcgtgtgaatatccagcttgaacgcgtggcagcccccgagaagccggcgccccaagccactggcgcaagcaaccctgcacacacgtcctaaggtgcgaccatcggtcgcccgttcgacataatctgtcgctttatcttcatttgctgtcgcgcccctgtaaattcacggttttggtcggtagaatcgacgcctttccgtacaaccccgtggagtgatggcatggccgacgtaaacaaggtcgttctcgcgtattccggcggcctggacacttcggtgatcctcaagtggctgcaggatacttataactgtgaagtggtgaccttcaccgctgacctgggtcagggcgaagaggtcgaacctgcacgtgccaaggcgcaagccatgggcgtgaaagagatctacattgacgacctgcgcgaagagttcgtccgcgatttcgtcttcccgatgtttcgcgccaacaccgtctatgaaggcgagtacctgctgggtacctccatcgcacgtccgctgatcgccaagcgcctgatcgaaatcgccaacgaaaccggcgccgacgccatttcccatggtgctaccggcaagggcaacgaccaggtgcgattcgaactgggtgcctatgcactcaagccaggcgtgaaagtgattgccccttggcgtgaatgggacctgctgtcccgtgaaaagctgatggattacgctgaaaagcacgcaatcccgatcgagcgtcacggcaagaagaagtccccgtactcgatggatgccaacctgctgcacatctcctatgaaggcggcgtgctggaagacacctggaccgagcacgaagaagatatgtggaaatggaccgtctccccggagaacgctccagacaagccgcaatacttggaactgacctaccgcaacggcgacattgtcgcgctggacggcgtcgaaatgaccccggccactgtgctggcaaccttgaaccgtatcggtggcgaacacggtatcggccgtctcgacatcgtcgagaaccgctacgtgggcatgaagtcccgtggttgctacgaaacccctggcggcaccatcatgctgcgcgcccaccgggccatcgagtccatcaccctggaccgcgaagtggctcacctcaaagacgagttgatgcccaagtacgccagcctgatctacaccggctactggtggagccctgagcgtctgatgctgcaacagatgatcgatgcttcccaggtacacgtgaacggcgttgtgcgcctgaagctgtacaagggcaacgtgatcgttactggtcgcaagtccgatgagtcgctgtttgacgccaacattgctaccttcgaagaagatggcggcgcctacaaccaggcggacgcagcaggctttatcaagttgaacgcactgcgcatgcgcattgcggccaacaaaggtcgctcgttgttctaagtctcagccggttttaagaatggccccttattcaggggccattttttttgcctatggattttgtgtggagatgcaatgtttataaaaggttaaacatttgttgatgtttttcagtagacgcattttcaaatgcgccttcgatggtgctgttgttgaaagtttgtagggcgaatgatttttttacacctgcttaggaactggtcttacagaagattcactcatgaaagtgaggtgggcgtataaaacacggaacactctgtaggaattaaggatgtaagagaatatgttaaatggaactaaaacagtcggacacttcttgcccggattcctgcgcgtaggacagaggcaaggggcatttcctgagagttgtgtgcggcacgtttacccaacccctgatactccatggatatttcactcaaaatatgtaagtccccggaaaggtctgaaaggatctataaaactggatacatctgagttggcgtttttttgtagggcaattcctttatcgctgtggggtgggtctctgcttgctgttgctcgggggggaacgctatgccaaccaggaaacgactaggctattgtgcttgctctaaataattcgaacagcgaaattggactttctcatgaataaagtgctgatcgtggatgatcatcccgtcattcgtcttgctgtgcgtatgctaatggagcgtcatggttatgaggtcgttgccgagaccgataacggtgtcgatgcattgcaacttgcacgggagcatatgccggacattgtcatactggatattgggattcccaaacttgacggcctggaagttatttgccggctgtcttctaccaagcaatccgtgcccttcaaggtgctggtgctgacgtcccaggcccctggccatttttccatgcgttgcatgcaagcgggggctgccggctacgtgtgcaagcaacaggacctgaccgagttgctgagtgcgatcaaggcggtgctgtcgggctacagctacttccccaaccaggcgctcaactcggtacgctccaccatgggcaatgccagcgaggccgatatggtcgagcgtctgtcgggtcgggaaatgatggtattgcagcagttggcccggggccggaccaacaaggagattgccgacggtatgttcctcagcaacaagaccgtcagcacctacaagacacgtttgctgctcaagctcaacgcccgctcccttgtggacctgatcgaactggcccagcgtaacggcttggtatagaggagggcaccgcagcgcgcattatctgggtaaccggcagaaaaaagcctccgtaagggaggcttccggccgtcgatcgttcgatcacagatcgaagtcgtaatcggccagctgtttttgcaagcgtcgttcttccagaagattgtcgatggtgcggcgtttgctcaaattggtcttggctacctcaacgacgggtgcctctgccacatcatcatccgattcaacgaggtcgtcttccacttccagttgttctttgccagtgctcataaggttcactccgggctaagactgccgttggcgctccttataacgataatccatgatcgggtaaaaaagattttttcaatcgcctgatcaagaaaaccaatgatccctcaatcgtcggatgtcttgtccttgtattcgcacaggtcttcgatacgacagctgccgcagcgcggcctgcgggcctggcaaacgtagcgcccatgaaggatcagccagtggtgagaatccagcagatagggcttgggtacaaacttcatcaactgcttttcgacctcaactacgttctttccacgggcaatgccggttctgttgctgacccggaagatatgggtgtccaccgccatcgtcagttgccggaacgcggtgttgagcaccacattggcagttttacgacccacccctggcagggcttccaaggcttcacgggtttgtggcacttcactaccatgcagttccaccagcaggcggcaggtctcgataacgtttttggctttgctgttatagaggccgatggtcttgatgtactcagacagtccttccacacccagggcatagatcgcctctggtgtgttcgccacgggatacagcttggccgtggccttattgacgccgacgtcggtggattgggccgacaggatcaccgcaatcagcaactcgaacggcgaggtgtaggccagttcggtcttgggttccggattgtcttcgtgaagcctgcgaaatatttccaggcgttttgcggcgttcatcgggtagcgggttccttgcagacggtcagcgggattgtatcaacacacaccgcaggtttgcgggtcaggtgttgctgagggcatccatatggcgctgcgcatcgtccagcttcagttgcgcctcggccagttgctgcggttcgacgttcaggtcctgggctttcttcagttccgctcgacgcatcgccagctggattttggcccgtttcagatcagcagtgttgctgaatgacgtcgctgctttcggtacgatccccacctccaaggcagccagcgcttgttccgccgcttcgaactgctgttgcaggatgatcaactgcgactgctgttcaaaggtcggtggatgaccaaacgccttcaaggatttgtgcagttgggcgcggctcatcgcgacagcgattttggcttttttggtcgccgcatcctcggcaacatcggcctgcacctgcaaaaccgacgtggaacgcttggcccgagcctggcgttcggcgagtctatctgcttcttcgcgttgcaggcgtgcattgcgctgctcaaagcgtcgccgcgccctgtcgcgtttcagaccgcgttcatggtgttgacggtcattgatcaccagtccgcccaccatgggcagcacacgggtcgctgggcgcatctcaatgcaatcgacagggcagggcgcaacgcacaggtcgcagccggtgcactcatccatgatgacggtgtgcataagcttggcggcgccgacaattgcgtccactgggcatgcctggatgcacttggtgcagccgatgcactcggcctcgcggatgtaggcaacctgggcgggcgcttccccgcgactggtgtccagatccagcaccggtacctgcagcaacagcgcaaggccggcgatggtttcctctccgccgggcgggcacttgttgatcgcctcgccacgcgcgatacccgcggcgtaaggcttgcaacccgggtgcccgcacttgccgcattgggtctgcggcaggagtgcgtcgatgcgttgaatgaggttcatgctgtgatcatgggcatagcaaaccgggtttaataggaggctggggctctcttgtggtgagcggggcaagcccgctcaccacaacaagctccttcaccacagcaagcccgctcactacaaggtggcttacttgatacgttgacccggcttggcaccactgtcagggctgagcaggtagatctcttcgccaccagggccggccgccatcaccatgccttcagacacgccgaacttcattttccgaggcttgaggttggcgatcatcatggtcaggcggccatcgagtttggatgggtccgggtaagcgctcttgatcccggagaacacgttgcgttgctcaccgccgaggtccagtgtcaggcgcagcaacttgtcggcaccctccacggcttcggccttgacgatcagcgcgacacgcaggtccaccgcagcaaacgcgtcgaagtcgatttctgcggaaatcggatccttggccagttcgccattaccagccggcgtcgattcgccagtgtcggtctggctggcgaccaggtcttctttcgaagcgtcggtcatggcctggactttcaccgggtcgatacgggtcatcagcggcttgaactcgttcaactgatgattgctgagcaggctggcgtgatcattccaggtcagcggcgccacgttgaggaacgcctcggcgtcggcggccagcagtggcagcacgggtttgaggaagatcaccaactggcggaacaggttgacgcccgttgcgcagatcgcctggacttctgcctgcttgccttcctgtttgttcagcgaccatggtgccttgtcggcgatccaggcgttggcgcggtcggcaaggcccatgatctcgcgcatggcacgggcgaagtcgcgggcttcataggcgtcggcaatgctcggcgcggcggccaggaaggcggcggtcagttccggcgcagcgttctcggctaccagtacgccggcattgcccttgtggataaacccggcgcaacggctggcgatgttgacgactttaccgaccaggtccgagttgaccttctgtacgaagtcttccaggttcaggtccaggtcatcgacgccacggcccagcttggacgcgtagtagtagcgcaggtattccggtgacaggtggtccaggtaggtgcgcgccttgataaaggtgccacgggacttggacattttctggccgttgaccgtcaggtagccgtgcacggcaatgccggttggcttgcggtagcccgaaccttcgagcatcgccggccagaacagggcgtggaagttgacgatgtccttgccgatgaagtggtacagctctgcgctggagtccttgctccagaacgcgtcgaagtccagctccggcgtgcggtcgcagaggttcttgaagctggccatgtaaccgatcggcgcatccagccatacatagaagtatttgcccggctcgcccgggatctcgaagccgaagtacggcgcatcgcgggagatgtcccattgctgcaggccgctgtcgagccactcggagagtttgttggccacggcatcctgcagggtgccgctgcgggtccaggtttgcagcatctgctggaaatccggaagcttgaagaagaagtgctgggaatccttgagcaccggggtggcgccggagattgccgacttcggatccttcaggtcagtgggtgcataggttgcgccgcacttttcgcagttgtcgccgtactggtcttcggtgccgcatttcgggcaggtgcccttgatgaaacggtcggccaggaacattttcttttccgggtcgaaatactgggtcaccgaacgctggtcgatgtgcccggcttccttgagccgcaggtagatctggctcgacagttcgcggttttcttcggagtgggtcgagtggaaattgtcgaaatccaccaggaactcggcaaagtcggcgctgtgttcagcctgcacattggcgatcagttgttccggggtgatgccttccttttcggcgcgcagcatgatggccgaaccgtgggcgtcgtccgcgcagacataaatgcattggttgccgcgatgcttctggaagcgcacccacatatcggtctggatgtactcaagcatatggccaagatggatggaaccattggcatagggcagggcgctggtgacgaggatcttgcgtggctcggacatggggctcggctacttgatgaaacggaggtcggccactataaagcgccgggaaatatatttcaccccgtgccgctgtttcagaatcttcccatcctgcgaaagcatgccgtaaggccgctggaacggttaggatagccacctgtttcattcagtctttttcgggagtagcccatgagcgccgtcaatcgcgcagcggtggaagccgtgcttcgccagtacaccgacccttatttgaaccaggacccggtcagtgccggctgtgtacgcgccatcgacgtccagggcgaccaggtgtcggtccaattggagctgggttatgcagccggtctgttcaagagcggttgggcacagatgctgcaaatggccattgaaggtctcgacggcgtgcggtcggccaaggtcgacatccgatgcgtgatcgccgcgcacaaggcccaggcacagatccctggcctggccaacgtcaagaacgtagtggctgtggcgtccggcaagggcggcgtgggtaaatccaccacggcggccaacctggccctggccctggctcgcgaaggcgcgcgcgtggggattcttgatgcggatatctatgggccgagccagggcgtgatgttcggcatcgccgaaggcacacggccgaaggtcaaggaccagaagtggttcgtgccgatcgagtccctgggcgtggaagtgatgtccatggccttcctcaccgatgacaacacgcccatggtctggcgcggcccgatggtctcaggcgctttgctgcaactggtcacccagaccgcctggggcgacctggactacctggtgatcgatatgccgccaggcaccggtgacatccagctgaccctggcgcagaaagtcccggtggccggctcggtgattgtcactacgcctcaggacctggccttgctcgacgccaagaaaggtgtggaaatgttccgcaaggtcaacatcccggtgctgggtgtggtggagaacatggcggttcacatctgctccaactgtggccatgccgagcatctgttcggcgaaggcggcggcgagaagctggccactcagtacggcgtggaactgttggcctccttgccgctgtcgatgctcatccgcgagcaggcggatggtggcaagcctaccgttgtggctgaaccggacagccagatcgccatgatctatcaggagctggcgcgtcatgtcggtgcgcggatcgtcctgcaggaagccgccacgcctgccatgccgaccatcaccgtcagcgacgactgaggcgtttgaagggaaaaagcctcgacgttgtcggggctttttcatgcctggaagacggtcaaggtgcgtttgtttcgcaattgcacagctggtcgtgtaagcatttgcttactttttcgtaagtgtttggggttttttccttccatggacgtccgttttcttcgagagttttttctaaccaattgaaatttaacaattaattattccgtgttcagggcgattgcatgtcagttcatgggttggatcccgttgaacttcctttggaactctttaagatcagccctgtgtccacggattggcacagccttcaaggaacgatggttgaaggaacgtcgcaggatgcgattcatcaggatgatgaaaaggaatacagggactagggaaaaaatgtgggcgggtcataccgccccttttttttgcctgcaggaaagtgaaaccggtcgtccagaaacgcaaaaaggcccgcaaggggccttttggaggggggcgacgctatcagcgttcgaggtctgcaatcttaccttttttgccatcccactccgctgcgtccggcatcgggtctttgcgttcagtgatgtttggccagatttccgccagctcgacgttcaactgaatgaattcctgcatctccgccgggacttcatcctcggagaaaatagcgacggccgggcattcaggttcacacagggcgcaatcgatgcactcatccgggtggataaccaggaagttcgggccttcgtagaagcagtccaccggacacacttcgacgcagtcggtgtacttgcacttgatgcagttgtcggtaacgacgaaggtcatttctaatattctcctcaggcggcggcagcgaaaccctttgtggcagggctcgcgaggttcgggagcgatagtctgcaggccaggctaaaagcctccagcatcccaaaccgcgcgagagtctaccagcttgcaagcgtctgcgttatatccgaacttgcagtgcatataacatttcgagcgcttttcgcggcgtcaagccatccaagtcaagcttagccaattcatccagcaccggatggggcaggctggcaaacatgtcgctctggtgcggcgcagccggtttgctggcggctttggctgggctggcgaccaccgtctcatgcggcagggccgtggtttccaggcggcggaggtgctcgcgagcgcgggtgatcacatcgttcggaacccccgccagttgcgccacggccaggccgtagctctggctggcgggccctggcagcacgtggtgcaggaacacgatacgctcgttgtgctcggtggcgttcaggtgcacgttggctaccagcggctcgctttccggcaacaccgtcagctcgaaatagtgcgtggcaaacagcgtgtaggcacgcaggtgcgccaggcgttcggctgccgcccaggccagggacaagccgtcgaaggtgctggtgccgcgacctacttcgtccatcagcaccaggctgcgttcggtggcattgtgcaggatgttggcggtctcgctcatctccaccataaaggtcgagcgcccaccggccaggtcatcgctggagccgatccgggtgaaaatgcggtccaccagggacagttcgcaactggccgccggcacaaagctgccgatatgcgccagcagcacgatcaaagcggtctgccgcatgtaggtggatttaccgcccatgttcggaccggtgatgaccaacatgcgggtatcgtcgtccagcgacaggtcgttggcaacgaacggcgtggtcagcacctgttctacaaccgggtgacgaccttgcacgatgcgcatgcatggctcgctgacaaaacgcgggcagttcaggtcaaggttcagcgcacgttcggccaggttactcagcacatccagttcggccagcgcggcggcagtgtcttgcagcggcgccaattggctgatcaagtcttccagcaagttctcatagagcatcttctctcgagccagggcgcggctcttggccgacagcgccttgtcttcgaattctttgagctccggggtgatgaaccgttcggcacctttgagggtctggcgacgttgatagtcgatcggcgccgattcggcctgcttgctgggcaactcaataaagtagccatgcacacggttgtagccgactttcaggttggccaggccggtgcgggctttttcgcgggcttccaggtcgatcaggaactgcccggcgttttcgctcagggactgcagttcatccagttcgctatcgtaaccggtcttgagtacgccgccgtcacggatgatcgccggcgggttgtcgatgatcgctttttccagcaaggccgccagttccgggtaggtcccggctgtgacggcgagttgttgcaggtgcggcgtatccagctcggtcatcgccacttgcagttgcggcagggcgccaagggcatcgcgcaggcgtgccaggtcgcggggccgtgcgttacgcaggccgatccgcgccaggatacgctcgatatcgccgatttccttcagctgtggctgcagcttttcaaagcgatagccgtccagcaggcaggtaatggaagtctggcgcgcttgcaatactgtcaggtcccgcagcggacggttcaaccagcgggtcagcaggcggctgcccatagccgtctggcaacgatcgaccaccgattgcagggtgttatcgcgaccaccggccaggttggtatccagctccaggttgcgacggctggcgccatcgagcaccacggtatcgtccagacgctcatgacgcaggctgcgcaagtgcggcagggcggtgcgctgggtttccttggcgtagccaagcaggcaaccggcggcgccgatggccagggtcagggtttcgcacccgaagcctttaaggtcctgcaccgagaactgctggcacagacttttcagcgccgaatcacgctcgaaatcccacggcgcacggcgcttggccccacgacgtttttctgccggcagatccttcggccaatcatccgggatcaacagctccaccggattgatgcgctccagctctgccagcaggttctcccagcccttgatctccagcacgctgaagttgccgctggtgatatccagcaccgacaggccaaacagacgctcatcgcccaacaccgcagcaatcaggttatcgcgacgctcatccagcagcgcctcatcactcaccgtccccggcgtaataatacgcaccacctggcgttctaccggccccttgctggttgccgggtcgccgatctgctcacagatcaccaccgactcgcccagcttcaccagcttgacgaggtaaccttccaacgaatggtaaggaatcccacacatcggaatcgactgccccgccgactgcccgcgcgcggtcagggtgatgtccagcagcttggcggccttcttcgcgtcttcgtagaagatctcgtagaagtcgcccatgcggtagaacatcaactgatcagggtgctggttcttgaggcgccagtactgctgcatcattggggtgtgggaggacaggtctgaagtggttttactcattgggtcgtaggcaaattcgttgaaaggagtggggcaaatgtggggcattccgccctgcgattttgcaatgggcgcaaggttaacacgcaaggtcggcgcttcgcaggtcgcaaacggataggtaaaacgcaaaagggggcggcgcatttactcaactgcaaataagcgcgccgcctgtatctgccatgcctttgtattacagcgcccgcacggggatgcagatgtcacagatgaactcaccggtgtcagaatcggttgcggtcgccgcaaaaaacgtctcgaaacatggccggtcatcgcattgcagaccgctggagggcatccattcacgcgtcagccacatccaggcatcggctattttgtctgttttccctttgaagctcgctacggcatagcggccgcccggcagggtctggatatctgcttgggcgctggtcacaaaagaggctggcacttcaacgcaggcgtcatagcggcacttagttggaggcgtgatcgaaggatcgtcataccctatgccgtaacaccgttcaccgccgaggccgttggagtgcatccacggcgccatggtcccgcgccagaagtagccgattgcggggccgtaggggccgatcaggcgttggtaggcaacgcgtaccttgggtaaatcaataatgcgtacgtccatggtgggctctttcactgaaggagaagagaacccagcgtcgtcgaacgtacgctcatgtgcctgatgggcattgccgaagacctgatcgggattgctctcctgcggacccggccgcggcccgatggcagccgcctgcgctgccagccgctgtggtgtgttggcgcgccactcggatggcgtgcagccaaactggagtttgaaggcccgtgcgaatgcttcgcccgaattgaaaccgctggccaatgccgtttcaagcacgctttcatggctgccgcaggacaggcggaacgctgccttctccagtcgccgccgccggacgtagctgcccaaggtctcgcccatccacgccgcgaaaatccgatgaaaatggaagcgcgaaaagttggcgatatcggccaaccgggcaccctccaagggggtgtccaggtgggcatcgatgtagttgagtacgcggttcatacgccgggcgtactcggcgcgggatgcgtgggcgcagattttggtggtcatagtgcgtggtagtatgcacaaaaaatgcaaattagcatttgccaagccaaaaaactcccgtcactatccccgttatgcaaaaacgcaacgtttctatcgtattaagagaactgctggaccgcgaccggatctcccccacggagcttcaccggcgtactggcgtgcctcaatccacactctctcggatcctcagcggcaagatcgttgatccgtcggacaagcacatttcccgtatcgccgagtacttccgcgtcagcaccgattacctgcgcgggcgcgcggccatgggcgctttgcgcgatgacgtgcgtgacccgatgcattcggaactcaaggacataagcctgtgggacgacgacacgcccgttaatgatgacgaggtgtcgatcccttttctgcgcgaggttgaattggctgctggatcaggaagattcgtcatcgaggaaagcgagaaggccagcctgcggttcggcaagcgcagcctgcggcataacggtgtgcagttcgaccaggccaagtgcgtgaccgtgcgcggcaacagcatgttgccggtgctgcgcgacggtgcgacggtcggggtgaacgcgggcaaaagcggcattggcgatatcgtcgatggtgacttgtatgccatcaatcacaacggccaattgcgcgtgaaacagctctatcgcctgccttccgggattcgcctgcgcagtttcaaccgcgacgagcacccggatgaggactatagcttccaggatatccaggatgagcagatcagcatcctgggccatgtgttctggtggggcatgtacgcccgttaaccttcttgcgtaagacaaagcccgccaacgagcgggctttttttcgtctgcagaaaatcgccaaaccctcggcccacgaggctaaaaatgcatgtgtgcatttatgcggtaaaaataaatgcatttatgcattgactgtatatgcatacatacttattcttcattcaagccagccaaacaaggcttggtggaggcggcaaggatgctgccaggaaagacaaggaaggcacgcaacaccggcaaggacgccatctgagcgatggcagggaggccaggcaacaccggcaaggatgccgacgctctttagttttaccgcttcaagaacaggcagcgatgaaccggcctcataacggttcagagggttggcaactgacccgggtgtgcagcgtaaagcaccagaagcagttatccggcagacagggatcgtggtcggaaaaacatcgaggaaagatccgtaccgcgccagtagcgccgaaagatcgaatatggaccgcattactgaaaagcccgggcaaccgggctttttggaatgcctacctacaaaatggatttacccaagagccggccccgcgccggtagtgctcagccaggaggcgtgacatgacaaacgagcagcaagcgttagcggaaatgcctatctggctggtgatcgtactggccctgatcggcggggtctccggagaaatgtggcgcgccgacaaggagggcgcccgcggttggtcgctggtacggcgcctggcgttgcggtccggggcgtgcatggtctgcggggtctcggccttgatgctgtgttacgccgccggcatgtcgatctggaccgccggcgccattggttgcctcaccgccatggccggcgcggacgtggccatcggcctttatgaacgctgggcagccaagcgcatcggggtcaaccaggccccgacctctcgcccggatcagcagtaaccgctgcaaggatgcaagcagatgacacctctcgaaaaaccttcccaactgcccgtggcgattggggatgcgctgaagagtgcgttcccacagcttcgggttggtaatcatcatgacttttctggagcgggcgataaaacgggcattttgatcagcgtggatcgcaacggccctggcattcgctcgcttgcaggacgcaaggcgcacgccttgtcggtttcactcaaggtcatggtcgccggcggctcggcaccgtttgatgcctgcgacctggccagccaactgatggacctggccctggataaccgctggggcctgccgcccgaacaatgcgacctgcccactgcgattgtcgcggcaccttccgtgctcaacggtgcggaaacggattacgacacttggtttgtatcctttacccagaacttctacctcggacggtctctgctcaaaaatcccgcaggcatgccgccttctacggacctgtatgtaggtgggtgtgagagggcggcgaatgtaacgccgcttcctactcaatcacacggaaaaggtggttcagtaaaaggaatttgcagatgttgaaagaattcagatgcggtaactgcaaccgacttctcgcccgtacgggtgggtttacagagctccagatcaagtgtccccgatgcggcacgttgaatcatgtgaaggccatgagcctcgagcaatcgcctttgagcgacatgaatgcggaatcttccgcgaacaatcagtcgactcaataggtgaagatatggaaccagtacaaatcggcagccgtttcaaatcgatcgcaacaagctacgcagaggcagttttcactccggcgcagaacgtcaatggcgcggtagttcgaacagctacgatgatcagccccgtcgggaatggatttattagtacaggcacgaccattccggaagggcgctgggtgacaaacgtgcccgttatcttgtccgccgttggcggttcttccactctcccgttctctgtgaccatccctgccggtcagggcctgtgggtagcaatgactcagaatggcggcggtactgcttatgtgacctacgacctgctgccgtaagtagtagtttctcgggcccaccaaccagaaggtcatgaacctctcccatcgcctttgagcgacatgaaagcggaatcctccgcgacaattcattcgacttaataggtgaacagaaatgcctgtacgcgaacttggtaaaaaattcaaaaaccagaccatcaacgggatgactaatcccatcacggtgctgatctctccagcagataatgtgaatggcgtcatccttcgatctttctacggtgccggcaccatggcttttgggccaaaggttcctaccgtcaaagatcgggacgatagtgttctgcaggaagttgccccaaacgtcctcgcctacaacgatttggccgtaccggctgggcttggtgtctatatctacaacattcagaactacgttctgccaaccaaactgtcgtgggacaccctgaacgcagacggtaccgttgcataggccgcgctgaagggcatagccctgatctcgtactgggcttttaggcaataccgcgcggcataggccgcgcaactatccaaggcctcgccatcgtgcggggcctttccgttttcggctcctccacacacatcgctccgagctgggagtgctggcggggctgacctatttcaaacatgccccacggagtcgagcgcatggagtatctacagcgcctgctcgacaagatcgacaggttcgaattattgatcgcgggcctcgttggggcggtgatcgccagttggtggcacaaggactacctggcggattggcatgcctgggtgatcttcttaatcacagggggggcgcgagttcgttgcacctgactgggatggtcagtgcctatcgcagttccaacacggacgttggtttgtctacctaggggggctttcaaggtgactgtggtgttgataacgcagcctcaattgattcaaatcatgccaggcgctcgccgtatggcgggccttttttcaaccgcgctgaatgcgacttttgctcggtacgaaatcaacagcgtattgcgcgctgctgcttttctcgcgcagatcggccacgagtccggcgaactgcactacgtgcgcgaactcggcagcgatacttatttgagcaagtacgacaccggcacactggctgcgcgcctgggcaatacgcccgaagcggacggcgacggccagaagtaccggggccggggtctgatccagatcaccggtcgccgcaactacctggcctgcagccaggccctgtttggcgacgaacgcttgctgcaacaacccgagctgctggagcaaccgcaatgggcctgtgaatccgccgcctggttctggcaaagcaatggcctgaatgaactcgccgacaaggaccagttcaccaccatcacccgtcgcatcaatggcgggctcaatggcctggaggatcgtttgcagttgtgggcgcgggcgaaggcggtgctatgcgtttcctaggtgtgctttgcgtatgcgtgctggtgactgttgtctggcaggtgcaggcgtggcgatacggggcgcagattgaacgtctgtcggcgacacagacccgggcagcccagcaacaacagcaggccgaacaagacaagcggctggcccttgagcaacaactcagtgccagcgaccagcaacatgcctgggagttgagcgatgcccaacgtactcaaacggctttgcgtgatcgcattgccactgctgatgtgcggctgtcagtccttctcgacgcttccagtggctgccccatgccggccgccaccgccgccggcagcgtggttcatgcagccccgcgagcccgacttgacccagcgcatgctcagcgaattatccgcatcaccgacgacggcgacagcgccctgattgccttgcgtgcctgccaggcgtatgtgcgcgccgtcgcccgttagtgtcttgagacagtccgtcacttgcgtgtgagattgtctcctgtagggtaggcgaacccccgcccacgactggagacgaccgtgaaggaaatcactcaactggctgccgaactgggtcgccgcctgcaggtgctcaacgcccacgtcaccacggccgagtcgtgcaccggcggcggtatcgcggaggccatcacacggattccggggagctcggcctggttcgaggcgggttatgtcacctattccaatcggcagaagacccggcaattgaacgtgccggaagccttgtttgcaaaagtcggggcggtcagccaggaagtagtcgaggcaatggtccgtggcgcccaggaaaaaagcctggcgcggtttgccgtggcggtcagcggcgtggcgggaccggacggcggttcgccggataaaccggtgggcaccgtatggctggggtttggcgtgggggaagaggtcacggtcgagcttgagcacttcactggcaaccgcgaggaggtccgccgacaaacggtaaaggccgcgctagagggcttgttgcgacgagctgcagcagaaatagaaaatcaggggtaggcgatccctgatctttgtggaacaatactgtctacttatacaggtgttggccgaccaggccttattgattacgtgaggactttaatggacgacaacaagaagaaagccttggctgcggccctgggtcagatcgaacgtcaattcggcaagggtgccgtaatgcgtatgggcgatcacgaccgtcaggcgatcccggctatttccactggctctctgggtctggacatcgcactcggcattggcggcctgccaaaaggccgtatcgttgaaatctacggtcctgaatcttccggtaaaaccaccctgaccctgtcggtgattgcccaggcgcagaaaatgggcgccacctgcgcgttcgtcgatgccgagcacgccctggaccctgaatacgccggcaagctgggcgtcaacgtcgacgacctgctggtctcccagccggacaccggtgagcaggccctggaaatcaccgacatgctggtgcgctccaacgccatcgacgtgatcgtggtcgactccgtggcagccctggtccccaaggctgaaatcgaaggcgagatgggtgacatgcacgtgggcctgcaagcccgtctgatgtcccaggcgctgcgtaaaatcaccggtaacatcaagaacgccaactgcctggtgatcttcatcaaccagatccgcatgaagatcggcgtgatgttcggcagcccggaaaccaccaccggtggtaatgcgctgaagttctacgcttcggtccgtctggatatccgccgtaccggcgcggtgaaagaaggtgacgaggttgttggtagcgaaacccgcgtcaaagtcgtgaagaacaaagtggccccgcctttccgtcaggccgagttccagattctctacggcaagggtatctacctgaatggcgagatgatcgacctgggcgtgctgcacggtttcgtcgagaaatccggtgcctggtatgcctacaacggcagcaagatcggccaaggcaaggccaactcggccaagttcctggcggataacccggacatcgccgccacgcttgaaaagcagattcgcgacaagttgctgactgcagcgccagacgtgaaagctgccgccaaccgcgagccggttgaagaagtggaagaagctgacactgacatctgaagcaaacgatgactgttgtactggatacactcgtcgccgttcggcgcaccgcaatggacctgctcgctcgccgcgagcatggtcgagtcgagctgacgcgtaaactgcgtcagcgcggtgcggagtccgagatgatcgaaaccgccctcgaccgcttgacggaagaggggctgctttccgaatcccgttaccttgaaagttttgtctcctaccgggcgcgttctggttacggcccggcacgcattcgtgaagaactgagccagcgtggcctgcaacgagctgatatcgaccttgcattacgtgagtgcggcatcagttggcaggcgcagttggaagacacctggcgacgcaagttttctggccatcttcccattgatgccaaggagcgtgcgaaacaggggcgtttcctgagctatcgcgggttttcgatggagatgatcagccgcttattgagcggtcgggatatggacgactaaacaccttgctgtgctggccgcattggcgaacagactttctatggcgagcggatttgctgtggtgactgggcttgttgcggtgagcgggcttgccccgcgttgggctgcgcagcagccccaaacccctcccctccgctgcacccgaaacaccaccaaaaagacccactatgaaaatagtgggtctttttttttgccctcaaaaaatcacgccggctccggcgcaacccgctgctgcgccttcccctgagcctgcgcccagttctccggcaggttgatgtaatccaccaactcccgtagccggccctgatcgcgaccattgaagttgaacaccagccgcgtcaaatggctgaaccgtggctcatcatgttcctcgccggtgtacgcgagctgttgaaactctccgctcaaccgcaggctggaaaattcagtctgcaaatgggccaatgccccatcgctgagcgggtgatgcatgcgcaccacaaactcacgcttcaaccagcgggtggagtggaagttagcataaaactggttgatctcttccaccgcctcttcggcgctgtacaccaggcgtatcagcttgagatcggtaggcaggatgtagcggttggcttccaactgactgcggataaagtccagggcgccttgccagaacccgccgcctggcgcgtccagtaacaccaccggcaccaatgggctcttgcctgtctggatcagggtcagtacttccagtgcttcatccagggtgccgaaaccgcctgggcacagtaccagcgcatcggcttccttgacgaagaacagcttgcgggtaaagaagaagtggaaggacagcaggttctcggtgccatcaatggtcgggttggcgtgctgttcaaacggcagggtgatattgaaccccaggctgtgttccaggcccgcgccttcgtgggcggccgccatgatgccgccgccaccgccggtgatcaccatcaaatcagaacgtgccagtgcagcgccgacttcgcgggccagggcgtacagcgggctttccaccggagtgcgcgctgagccgaataccgttactttgcggcggcccttgaactgttcgagcacgcggaaggcattgtccagttcacggatggcttgcagggtgatcttggcgttccagcgattgcggtcgtcctgggccatgcgcagcacggtgaggatcatgtcgcgatacaggggaatattcgggctgttgggagcgatcagctggagttgggcgtcgacctgctgcgtaaggtcagcaccgttttcttcaaagtgccgaagcaggcggtcattcggttcgtaaggcattcaacttctccttattgcagggcccgggtggccgacgagccgttcgccggaggctacgacactgcatgtgtcgttgcttgccgcagggggcaaccttcttttgccctgaaaatgttacagaacagcatgaaaagtgctgtgaatgaatggtcgggatgacttgatcatgggccgcaaaacccttggctggcaaccgcttattggtcactcgtcagggagtttagctgttggcaggatgttgaagcggggaagtgcgcgccaccgggcggcagcgcgcgaaggtcacgctgttactttttcttttttgccgccgccggtgccgggcaatccgcttcgatgaacttcaccgaggccacaggacggttggtcttgttctcggtgatttcgtagcgcatcactgcgcccttggccatcagctcgcggtagcccttgttcaggcacacgctctggcccagctggaaatacaccgccttggggttggcgcgcatctgttcggcgcggtcaggcaggacgctcaggtgatcgatcagttgcatgccttccacggtgtaggccacttccagggtcttttcgtcgatttcccggggcaggtccttattactttcggccgcgacgctttgcagcttccggttcatttgggcctccagcagcgaggccgcctgggcgcacacgggcaataccagcgcgagggcgacggatggggcgacaaaacgcagcatggaacgcagcatgaaactctcctgattcggttactggtgcatagaccagccactgcgctgtgcgttcagtggcgcgcaattataggtgagcccttgccactacagccaggcgtatcgctggtaaactgcggccacttccgccttccacgagttttcaccgtgtcgatttacccgtcccaacggcatagccgatgagccacgccgtttcccgcctgcgcacccagcgcctggcccgtgccgtgcggccgttcctcaatcgtggctcgcgtgccgaacgttgccccggctgccgggtcatccccgaatactgcctatgcgcctggcgacccaaggtcgaagcgcgctccgccatgtgcctgctgatgcatgacgttgagcccatgaagcccagcaacaccggttggctgattgccgatgtcatcaaggacaccacggcattcgcctggtcgcgcactgaggtcgaccctgaactgctcacgttgctcgccgatccgcagtggcagccctatatcgtgttccccggcgaattcgtcgtgcccgagcgcgtcgtcagtgaagtcaaggtggaggagggcaagcgcccgctgttcatcctgctggatggcacttggagtgaagcgcgcaagatgttccgcaaaagcccctacctggaacatttgccggtgctcagcctggcgccggaacagctgtcacgctacaaactgcgccgttcaaagcgtgatgaccacttctgcaccgctgaagtcgccgccctgtgtctggaactggccgatgatccagtcgccagtgaagtcctggacgcctacctggatgtcttcagcacccattacctggccgccaagttccagatgccgctggatccgacggacactgtgcatacgcgccttgcgccctatattccgacggcgtaaccagacgacgtttgcatgatggcaccacgcacccgcaacccgctaaaatgcccacgggcgtagtgcttgaccctccaggctacgctgggcatgctgggcgccgatcagggcccccctaaaaacaggatcatttaaacaatggccacatacgaaatcctgatagccgatgaccacccgctgtttcgcagtgcgttgcatcaggccgtgacccttggccttggcccggacgtgcgcctggttgaagtggccagcattgctgaattggaagcccgcctcaccgaaaaatccgactgggacctggtgctgctcgacctgaacatgccgggcgcctacggtttctccgggctggtgctgttgcgcggtcaatacccgcagatccccgtggtgatggtctcggcccaggaagaggccgacgtggtggtgcgctccaaggagttcggcgccagtggtttcattcccaagtccagtgcgatggaagatatccagaaagccgtgcgcactgtgctggatggcgacgtgtcctggccgccgcaggcttttgaagaaatcaacgtgtccgacgaagccaaggctgcccgtgatggccttgccagcctgacgccccagcagttccgggtgctcaccatggtctgcgaaggcctgttgaacaagcagatagcctatgagctgagtgtgtcggaagcgacgatcaaagcccatgtgacggcgatcttccgcaagctgggcgtacgcacacgcacccaggcggcgctgctcttgcaacaacttgagtcaatttcgcagcactaacgtgtttccgattcacgcttttttgactttgcgtgatctagttttcccacttctttggttcagttgcctacatctatgtcgcctttcaagggtcaaaccggtatcaaacgtatcttcaatgctgggggatattccctggatggtctgcgcgcggcgtttaccggcgaggcggccttccgccagttggtgttgctcaacgtgatcctgatcccggtgagcttctttctgaatgtcagccgggtcgagcgcgcgttgcttatcgccgtatgtttacttgcgttgatcgtcgagttgctcaactcagcggtagaggctgcgatcgaccgcatctccctcgaccgccacccgctgtcgaaaaacgccaaggacatgggcagcgccgcgcaattcgtggcgctgaccatgatcaccctggtgtgggccgtgatcctgatctaagcctcaggcaatacttggcaacacgatctcgtcgctgcgctgcaccccggcggtgaaggcgcggcacagttcgaggaattcgcgcatcgccgaggtctggtacttctgtttatgccagatgaagtagaactgccgagccaggtccaggtccggggtttccaccggcaccaggctgccgcggcggaacgcgtcgcgcagcgccagtcgcgaaatgcagccaatccccagtcccgattccaccgcacgcttgatcgcctcggtgtgttccagctccaggcggatattcagcgcgctacggtgatggcgcatggcttggtcgaaggtcaggcgcgtgcccgagccttgctcccgcaggatccaggcctcgtgggtcaactcatccatgctcgccacgccacgcttggccagatgatgctgcggcgcgcaaaacaccaccagttcatcttccacccaggtttgcacctcgatatccgggtggctgcagtcgccttcgattagacccaggtcaatttcgtaatgcgcaacttggtgcacgatatgtgcagtgttctgcacatgcagtttcacctggctctcggggtgctgttgcatgaagctgccgatcagcagggtggccaggtagttgccgatggtcagtgtggcgccgaccgccagggagccgaagccggacttgccgttgagcaggtcttcgatctccttggcctggtccagcagcgctaccgcctggggcaacagttgatgaccgagcgcgttgaggctcaggcgtttgcccgcgcggtcgaacaattggcagctggattgacgctccagctcggtgatcgaggtgctggcggcggattgagataaggccagaaggccagcagcgcgggagacgctttcctgctgggcgacggcgacgaagacttgcagttgacggagagtaaatcgcatatcgatataaccgataacccttatcttaataatccagttaacagatattgtcgccgccattagaatgctgtgcaattgcgcaactacatttggcgcagacccatttccaggagtcccccgtacatgagcaacatgaaccacgagcgtgtcctcagtgttcatcactggaacgacactctgttcagcttcaagtgcacccgcgatccgggcctgcgcttcgagaacggtcagttcgtgatgatcggcctgcaacaacccaacggccgcccgctcatgcgcgcttactccattgccagcccgaactgggaagagcatctggagttcttcagcatcaaggtgcccgatggcccgctgacttcccaattgcagcacttgaaggaaggcgacgagatcatcatcagcaaaaagccgacaggcaccctggtgcttgacgatttgaagccgggcaaacacctttacctgctcagcaccggtactggccttgctccgttcatgagtgtgatccaggacccggaaacctacgagcgtttcgaaaaggtgatcctgtgccacggcgtgcgttacgtcaacgaagtcgcctaccgtgaattcatcaccgagcacctgccgcagaacgaatttttcggcgaggccctgcgtgacaagctgatctactacccgaccgtgacccgcgagccgttcgaaaacgaaggtcgcctgaccgacctgatgcgcagcggcaagctgttcagcgacatcggcctgccgccgatcaatcctgaagacgaccgcgccatgctgtgcggcagcccaagcatgttggatgaaaccagcgaagtgctgaacagcttcggcctgaaggtttcgccacgtatgcgtgagccgggtgattacctgatcgagcgcgcattcgtcgagaagtaagaaagtcaggcaatatgctgactgggccacacagaacatccaaatgtgggagggggcttgcccccgatgagtgcgtgtcagttgatacatctgtagctgacacaccgctatcgggggcaagtcccctcccacattgggttttcggtttatccagccggtagcacttccaacacacaaatcacccccgcctctggatagtgccaacgcacatccacatcccagaactgcgccccgtattcccgctccggccccggcacctgatacgccggccgtggatcctgcgccaggcactgatcaatcagttcaaccagcggctcgccaaggcgctgagcatgctcttgtgcctgttgcagcgcagtcttcagccactgcacggggatcagctgcggcgctgtgctggcgatgctgttggtggctgtgtcgacaatgtcggcatacggcacatacggcttgatatccaggataggcgtgccatccagcaagtcgatccccgagacccacaggcgccccggttccaccttgtccagcttgactactgactggccgattccgttggggcgatgggtcgcacgggtggcaaacacgcccatggatgtattgccgcccaggcgcggcgggcgcactttcaggcgcggcttgtcttccagtgcctggtgaaacaggaacagcaaccacacatggctgacctgctccaggccttgcaccgcttcacctccatcgaacggcgccaccagctccagcacgccacgggcggccggcgccaactgcggttggcgcgggatggcgaacttctccttgaagcaggagcgtacgaaaccgacgggtgagacctggtaactcatggcttacgcacgaacccgcagggtcaggcccttgaggaaattacgcagcaactggtcgccgcacggacggtagttggtgtggccgaacttgcgaaacagcgcgctcagctccggcttggacaccgggaactcggcggccttgaggatggcgtgcatgtcgtcttccttcagctcgaaggccacgcgcagtttcttgaggatgatgttgttggtcaccggcgtttcgatcggctgcggcggacggctttcgtccttgccgcgcttgaagatcaccaggccatcgaggaaatgcgccatgacgtcgtccgggcagaacacgaagccttcttcctcgtccttcttgaggtaggtgagcaggtcgtccttggtcacgtccatgccgccgagcttgatgatctcgaccatcttgttgtcgctgatgtcgagcatgtagcgcacgctgcgcagtacgtcgttgtgaatcatggtgggcaatcctggtattcaactgaggacaccgccagtcaggcggtgtcggaaaagggcggcggcttagaacttctctttgccgctcaggtaacgccactggccgaccggcactttgccgatggacacgccaccgatgcggatacggcgaatggcgatgactttgaggccaaccgcttcacagaacagcgcgatcacgcctggctgcgggtttttcatcgcaaaacgcaggcggttttcgttctgccagctggctttgaccgcaggcagctctttgcctttgtaggtcaggccgtggttcaggcggttgaggccgtgggcaaccatatcgccttcgacctccaccacgtattcctgctcgatcttggccgcatcggcggtcaacttgcgcaggatcttccagtcctgggtgaacaccagcaggccgctggccttggcttgcaggtcggcgctggcggtcaggcgcaggaagtgccccttgagcgggcgcttgccgaagcgatgttcttccgagagtgtttcggcgctgatcgacgccatggccgtttcggcatccacgccggccggggcgtgcagcaggatggtcaccggttcgggcgcggtggccttggcctccgggtcgagttcgactttctgggtggtgaccttgaactgcggttcgtcgatcacttcactgtccaccgagacccagccgccttcgatgaacagctcagcctcccgacgggagcaaccgaccagttcgataaggcgtttggagaggcgtatggggtcagtcatgacaagggccgtaacaaaagggggcggctattgtacctgtgtgggcgcggttaatcccggctccatttcatttagccttggcgggtatgttgttgtatctggcgcaaacgcatatgcagtaacggataaggctggccgagcccatcatgctccgtgcgtccgatcacctcaaagccttgtttgaagtagaagcccagcgcctggtggttctgttcgttgacgtccagcgcttcggcgttcaagtgctcgattgcataccgcagcaattgccggcccaggccaccaccccggtgctgcgggtcgataaacaacatctcgaccttgccagccgctaccccggcaaacccagtgatgcgttggcgggcgtccttggtgcagatcagcatcacggcatccaggtagcgggacagcaccaggtttttcaacaactcgatgtaagtgtctggcagaaagtcatgggtggcgcgtaccgaggcctcccagatccgcgccaactcggggtagtcgctggttttaggtgtgtggataaccgaatgctgacgcatgcccgctgccccttgccgatgttcggcgctgatgggcaaaacgatagacctaaaaaagccccgcatcttgtccagaagcagggctttttgatttttttacgccgatcagtcgcgcttttcagcccacaggtcgtattcatcggcatcggtcacggtgcaccagaccttgtcgcctggtttcaaaccgctggcatcgtcgatgaacacgttaccgtcgatctccggcgcatcgaagaagcagcggccaacggcgccttgctcgtcgacttcgtcgatcagcacttcgatctccttgccgatacgcagttgcaggcgcgccgagctgatggcctgttggtgcgccatgaaacgctcccaacggtcctgcttgacgtcgtccggcaccacggccaggtccagcaggttggcgggggcgccttccaccggcgaatactggaagcagccgacgcggtccagttgggcttcggtcagccagtccagcaggtactggaaatcttcttcggtttcgccggggaagccgacgatgaaggtcgagcggatgatcagctccgggcagatctcgcgccaattcttgatgcgcgccagggtcttgtcttcgaaggccgggcgtttcatggccttgagcactttcgggctggcgtgctggaacgggatgtccaggtacggcaggatcttgcctgcggccatcagcgggatcagctcgtccacgtgcgggtacgggtagacatagtgcagacgcacccacacacccaggctgctcaaggcttcgcagagttcggtcatgcgggttttcaccggtgcgccgttccagaaaccggtgcggtatttcacgtcgacgccgtaggcgctggtgtcctgggagatcaccagcagctctttgacgccggacttgaccaggcgttgggcttcgtcgagtacgtcaccgaccggacggctgaccaacttgccgcgcatcgacgggatgatgcagaagctgcagctgtggttgcagccttcggaaatcttcaggtacgcgtagtggcgcggggtcagcttgatgccttgcggcggcaccaggtcgatcagcgggttgtggtcctggcgcggtggcaccacctcgtgcacggcgttgaccacctgctcgtactgctgcgggccggtcaccgccagcacgctcgggtgcacgttgcggatattgccttcttccacacccatgcagccggtcacgatgaccttgccgttttccttgatggcctcgccgatcacttccagggactcagccttggccgagtcgatgaagccgcaggtgttgaccaccaccacgtcagcgtcctggtaggtggacacaacgtcgtagccttccatacgcagttgcgtgaggatgcgctcggagtcgaccagagccttcgggcaacccagggaaacaaagccaaccttggggttggcttttgcgatggtggtggacatgtctaacctcggtattgaatgacgccgcccgtcgggcacgacagggctgcggacgggcgcttggtgcgcctctgatcaaaaagtgcgcaattctagcgatgggcagcgcacttgaccagctttatgcagggaaatgcgacgagtgctgttttgggccattcaagcggtccttactctacctttaggctcggaggtcctgctctgtacggtgcgctacaactttagacatgcctacacctaaagcctgaagtactttcaggagggtggagagcttagggtcgccgccgacggcgatggatcggtagagattggctctattgagccccgtgttctgcgacaaactgagcattccgccacgagcttccgccactcgacggatagcaacgaggaaggcgtcctcaccacccgcttcatcgatttcctcaagcgcgacagatagatactcgagcgcaaacgcttcgtcgtcgcggagcatttcaagaacgctgtcttcgtgagagcgcgtacgaatggtcatttttgctgcaccttgtaagatttccagagagctttggcctgatcgatgtcgttctgctgcctggcctctgagccaccgcccaacaggaaaataattttccgatcctggattgcgtaatacacgcgaaaaccaggcccgaagtctagcttcatctcaaagaccccttcacccacaggttcggtagcgccaaagtgaccgagggacgctcgatctactctggtggtgattcttgcttttgaacgtgtgtcctgcacggtgtctagccaggcttggtatatatccacgccgttgactgagagtacgtgtttcacttcgtacatgaggactgtaccttaaaagagacagagtgatgattgagtttctgtatcgaatgggcgcgccaacaagcagaggcaagatttattgctcaggtgggccggccaaggagctctcgattacgccgtcgatgcggcactgcggaggcgggccgaatatacggttgagcgtagatgtgatcaatgcaggcaaaaaggctccaaagtgccttgccctctatgagcggttgcacaaaaccccacccaaatcacttgaacagcgaaatgcgacgagtgctgcgctatgcttcgcgccgttgtgcgtaggtaaaaccctaaggtcaacaaaacgtctgttacgagaagtaaaacggcgcatgctagggtcagcttagacgcgttgttaataaaagaccgcaggtcaaagggcaggagtggttgatgggtcacgcgagtagtcaggcagcaggtgccgagcagtcaaacgccaagccgattggcatgctggtggcagcggtcggggtggtttacggcgatatcgggaccagcccgctgtacaccctcaaagaggtgttcaacggcggttatggggttcaggtcaaccatgatggcgtgctggggatcctagcgctgatcttctggtcgctgatctgggtggtctcgatcaaatacatgctgttcgtgctgcgcgccgataaccagggcgagggcggcatcatggcccttacggctctggcacggcgggcggcgggggagcgcaagaagctgcgcagtttcctcgtggtgtgcggcctgtgtggcgcggcgctgttctatggcgacagcatgatcaccccggcgatttccgtattgtccgcggtggagggcctggaactggcgttcgatggcctggagaaatgggtcgtgcccatcgccctggtggtgctggtggcgctgttcctgatccagaagcacggcaccgatcatatcggcaagctgttcgggccggtgatggtgacctggtttctggtgctcggcggattgggagtgtatggcatcaccctgcaccctgaagtactcagtgccatgaacccgatgtgggccatacgcttcttcgaggctcaccccggcattggcgtagccatcctcggcgcggtggtgctggcactgaccggcgccgaagcgctgtatgccgacatgggccacttcgggcgcaaacctattgcccgggcgtggttcatgctggtgctgccggcgttggtgctcaattatttcggtcagggcgccatgctgctgggtgatccggaagccgcgcgcaacccgttctacctgctggccccgagctgggcgctgatcccgctggtggtgttgtccaccctggccacggtgatcgcgtcccaggcggtgatttccggtgcgttctcgttgacgcgccaggcgatccagctgggttacatcccgcgtatgcatatccaacacacctccagcgccgaacagggccagatctacatcggtgcggtgaactggtcgctgatggtcggtgtgatcctgctggtgctcggcttcgaatcctccaacgcactggcatcggcctacggcgtggcggtgaccggcactatgctgatgaccactatcctggtgtcggcggtgatgctgctgctgtggaaatggccaccgatcctggccgtgccggtcctggtctgctgcctgttggtcgacgggctgtattttgccgccaacgtgccgaagatcatccagggcggcgctttcccggtgctggcggggattgtgctgttcgtgctgatgaccacctggaagcgcggcaaacaactgctggtggagcgcctcgacgaaggcggcctgccgttgccgatctttatcggcagtatccgcgtgcagccgccccatcgcgtgcagggtaccgccgtgttcctcaccgcgcgcccggacgccgtgccccacgcgctgttgcacaacttgctgcataaccaggtgttgcatgagcaagtggtgctgctgacggtggtctacgaggatattccccgcgtaccggctgcacggcgcttcgaggtggactcctacggcgaaggcttcttccgcgttatcctgcactttggttttaccgatgagccggacgtgcccgaagcgctgaagttgtgtcacctcgatgacctggatttcagcccgatgcgtaccacctacttcctcagccgcgaaacggtgatcgcctcgcgcatcaagggcatggcccgttggcgcgaagggttgttcgccttcatgttgaagaacgccaacggcaacctgcgcttcttcaagctgccggtcaaccgcgtgatcgagctgggcacccaggtcgaaatgtaagcggcagtcacacgggagccggcaatcggctcccgcttttccttctgaaccctgtgcaatccagcgttgtcgactaggctctaagcaccgtttgaatagtgcccacagaacccagaagaggtgcgccatgagtcagctgctcgaaccctataccctccgtcaattgaccctgctcaaccgcatcgcggtttcaccgatgtgccaatactcaagcgacgacggcctggccaatgactggcacctggtgcacctgggcagccgtgccgtcggtggcgccgggctgattttcaccgaagccaccgccgtgaccgccgatggccgcatcaccgcccaggaccttggcctgtggaacgatgcccagatcgaaccgctgcaacgcatcacgcgtttcattgcggcccagggcgcagtggccggcattcaactggcccacgccgggcgcaaggccagcacccaccggccgtggattggcaagcatggcagcgtcaagcccgaggatggcggctgggtacccgtgggaccgtcaccgattgccttcgacccccagcacacccaacccaagcagttggacgaagggcagatccagcaagtgattgccgattttgtcgccgcagccaagcgcgcattgaccgccggtttcgaagtggtggaaatccacgcggcccatggctatctactgcatcaattcctgtctccgatcagcaaccaacgccaggaccagtacggtggctcgtttgaaaaccgcatccgcctgttgctgcaagtgaccaaggcagtgcgtgaggtctggccccaggagctgccgctgtttgtgcgggtatcggccaccgactgggtggaagacggctggaacccggatgaaaccgtggagttggcacgtcgcctgaaagacctgggagtggacctgatcgacgtttcgtctggtggcaccgccgccaacgccgagatccccaccggtcctggctaccagacccgcttcgccgagcgcgtgcgcaaggagtcgggcatcaccaccggcaccgtgggcatgatcaccgagccggcccaggccgagcacatcctgcgcacgtgccaggcggatatcatcttccttgcccgtgagctgttgcgcgacccgtactggccgttgcacgccgatgatgacctgggtgggcgcaaggcaatctggccggcgcagtaccagcgcgcaacccatcgtgaccagcccattcatgaatcagatttgagagattgagccctgacacgctccgccgaaacccaccctcacccggtgggtttttttgcgttcatagcgtgggatcacgctgtaggtatttgttaccgatgtaattatttaagtgattactctaaaaaaatcgcacgctcggcgagatcgtttctacgcttagggtaagcctgatttctggcccaggaagtcagtcggttttcccacacagacgttgcgctttagggagaagggtaatgggcaccaggagtatttgatggatatcaggagaagcagtccatggccaagtcctatggtgtagcgggtgcggtagcgtcttttctgacccgcagggtgtctttgcgcgggcgaaggttgagctcggatgaagaggagttgctggcgcagtaccgcgcactgaccgagaacgatcaggtggcgatgcgttatttgattggggcgatgaagagtgtgtcgcggttctgaaacgaggagggggcgttcccacgcaagcgtgggaacgcggtgcatcaggtgtacttgcgctggtccggtgccggcgggaagtactggtacagccaggtttcgctcaaggtgcggtcctgggtgcgaatgaacaggcgcagttccaccggctccacgctgtcgctggtcgggtaccagtcgaacaggatgcggtagcccttgatgttatccagtaccagcacgctgaagtccttcacctggccatgggaacaggtcaccaccggctcgatgccggtgcctggcggcaggcgatccaggccgccgcccttgaagtccacggcaaagcggcgcgcccagacttgcgggtagtgctcacccggtgcccagccttcggtgaagccacccatgcccgagcgggttgcatcgacttgcgccaacggcgtgctcaccggcggcagcgcgctccagtacaacttgtagccatagttgagtgaatcgccggcggccacgggttttttcggagtccagaaggccacgatgttatcgagcgtctcgccggtggtagggatttccagcaggtcgatcgagccttcgccccaggcggtggtcggttcgacccacaggctcgggcgcttgctgtaccagtccacggtgtcctgatagctggcgaactcatggtcggtctgcaccaggccgaagcctttcgggtctttatcggcaaacgcgttgaattgcagcttggccggattgttcagcgggcggcagatccactcgccgttgccgcgccacatggccaggcggtccgagtcgtggatctgcgggtggatggtgtcgcacatgcggcgctcgtgggtgccgcaactgaacatgctggtcattggcgcgatgcccagttgttcgatggtggtacgcgcattgatatgcgcgtcgatggccatcaccacctggttggcctggcagtcgatatcaaagcggtacgcgccggtggcgctcggcgagtcgagcagggcgtagaccacgaagcgggtggcgttcttgtccggggtttcgaaccagaactgcgtgaagtcggggaactcctcgcgttttttcgcgtaggtgtcgatggccaggccacgggcggaaaggccgtactggccggtggaatccaccgcacggaagtagctggcaccgaggaatgacagcacgtcatggcggtccagctccggcgccttgaacagcttgaagccggagaagcccaggtcgccggtcagctgtttggtgtcgaccgtggttttttcgtagttgaacagcgaaggacggaaatgcacctcacgggcttcgcgggtcttggggtcgacgctgtgcatgcgcaccggcgtcttgaagcccatgccgacgtggaagaactgcacgtccagttggccgttcaattccttccacagcgaatggttgccgtcgtagccgatggcgttgaaattctgcggggtcatggtcgccagcgtgggcggcagcacctgtttggtgtccttgtaagcggtcccggcgagttgtttggcctgggccttgagcgtgtcgaagtcgaacgccacggccttgccatcggcagcacggttcccggcccaggcctgggcggcgagcaggccgctggccgacaaaccggtgtaagccgcaatggccatggacgctttgagcaaattcctgcggtgcatagagacaacctgtcgtgagcaaatcccgcgccgttcctggcgcgtagcggatcagaaattacggttcggacatgccttcgaccaaacgcaacggacattaaacagacgccggatagcttaagcggttcgatgacgtaggaaaattgattgatagcggcacgatggcattgcatatgcgacaagacatttccaattctgtggccaaaacactacttacgaaatatgaagatccaaatgtgggagggggcttgcccccgatagcggtatgccagtcactgaatactgcgcaggtccaactcaatcgggggcaagccccctcccacatttaggctgcatttcaggcgacttcacccactgctctgaacgcctcatcaatcgccgcatgggcatacgcactccacgccgcgtccgagttggcgatgctcacatgccccagcggctttttcgccagcttcatccacgcttcggtttcatcggcatcatcgaacaagctgttggagaagctcgcataaccgtgtgaccagcggttgacagtgatcgccagaatatcggtctgatggttgaaaccacccgggccaagcatgcgttgcagctggtcacgcaactgcgtttccaactgttcgaaggtctggccatacaacttgccacgcccggcgcgggcctggtcgcgggcgttcatgccgctgttggggctggtgggcacgtagaccatgtgcaagccgatcggctgcgtcgggtcgcgcgggtggtcatagccgcccatgcttaccgggtagtccagtttgatccggctgtagggctgggtcgccgcgtaaatctcgtgcacgccgagcttctggaacgactgccaattgcggatcaccaccttggtgtacaccagcgggtacttcacgttctggctcagggcgtgagcttgcggtgccggcaaatctttcaacagatacggaatcatcatgttgtagcaggccaggatgcagcgtttgccacgcacttgtgcgagttgtccgccacggctgtagccgatatgcacgccgtcgccgacattacgcacgctgaccgccgtgctgttcagtcgcaggcgtacggcggccttgggctggtcgagcttggcgtagtcgaacgccgccagcacgatatcgtccatggtgtgccctggtgccacgcccgggatcaggctgcgtaccagcaagcgcgccaccgatgcattgccgtccgggaagtgatagatgtagggctcttccatttcagcagcggcttcttcgctgatcggcgccagattcatcccggcaaaacctgggaaacccacgttgtaggcatcggccgacgccacggcatcaatgctcagcgccatgaagtcattggtgcggctctggaagtacttcactgcgccttccgacaggcctacgttcttcagcaggaaatcgcggtagctggtggctgccaaatagtcggccttttctttggcggtcttacctggcaggtagtctttgggcgcggtgtgcaactcgatcaaggcctgacggtctgccgccggcaacgggaagtcattgatgaaatcgcggagggctcgtgcgttgagttggtcgggggcgatgtcgtcggcgaccattggcgtcgggtcgccggtcaccagcttgtcttcgccgaagttttccttgtcgaaaaacaccccgcgcgacagcccgaggccagggtagaactggcggtcgaaggcggtttcgaagcgcttgatgttcacgccgagctttttcaacagcccgttcacttccttgctgtacaggtggttgggcgactggaacgcctcgctgccaccgtagccgatgatcatgcggccaccggcctggaattcattgcgcttggcgtggccgccgaagtcgtcgtggttttccaggatcaggatcttcgccttggggtgcttctcgcggtagaaccacgccgccgacagcccactcaggccgccacccacgaccaccaggtcatagtactcggtgatcggcagcttgtcggtgtcgaacaccttcttttcccagcccatctggtgcgccacttcgaacgaaccggcgtggctgccgcgcaggccggtcagggcaggagggtagtaacgaccgtcgggggcggcttgcaggatttgcagtggggtcatgccggcggcgatggtgacagcgacgccgttgaggaagtcgcggcgggtgatatccatgggggatcctgagcattattgttataggttcccggcatccaggaaggatgccgggttgaatcgtcagtgcttgaacatcacatgccgcacggtggtgtagtcctccagcccgtacatggacatgtccttgccatagccggacagtttctgaccgccgtgaggcatttcgctgaccagcatgaagtgggtgttcacccaggtgcagccgtactgcagacgtgcggccaagcgatgggcgcgtcctacatcggcggtccacacggacgaggccagcccgtagtccgaatcgttggcccagcccagcacctgagcttcatcgttgaacttggtcactgataccaccggcccgaagacttcgcggcgcacgatctcgtcgtcttgttgcgcgtcggccagtacggtgggttcaaagaagaagccattgccttccacggccttgccgccggtcaccaggcgaatatgcggttgtgccacggcccgctcgacaaacccggcgacacggtcgcgatgctgcgcggtgatcaatggccccaactcggtggccgggtcatcctgcaatccatatttgatactggcgaccgccacgccgagtttctcgacaaacgcatcgtagatatcggcctgtgcataaatacggcacgccgcggtgcaatcctgcccagcgttatagaagccgaaggtgcgaatgccttccacggcggcgtcgatatccgcatcgttgaagatgatcaccggcgccttgccgcccaactccatgtgcatgcgcttcacgctgtcggcggtgctggagatgatgtttgcgccggtggcgatggagccggtcagcgacaccatgcgcactttagggtgcgtcaccagtgggctgcccacggttggcccacggccaaataccaggttgagcacaccggccgggaaaatatcagcggccagttcgaccatgcgcaaggccgtcagcggggtttgctccgacggcttgagcaccacggtattcccggcggcgagggccggggcgattttccaggcgaccatcatcagcgggtagttccacggcgcgatggacgcgatcacgcccaccgggtcgcggcggatcatcgaggtgtggccgggcaggtattcaccgccggccgaaccgctcatgcagcggctggcgccggcaaagaaacggaacacgtcggcaatcgccgggatttcatcgttgagcgcggcgctgtagggcttgccgcagttgtccgattccagcttggccagttcttcgccgtgggcctcgatcacgtccgccagtttcagcagcagcagcgaacgatccttgggtgcggtttgcgaccagccttcgaaggccgcatcggcggcgcgtacggcggcgtcgacctgggcttcgctggcttccttgatttctaccagtacgcgaccgagcgccgggttgaatacagcctgcgccgggccttcgccttcgaccagttggccgttgatcagtaatttggtttgcatggttcagctctccaccaactatcgttatttccttgaataaactggctctaaatgtgggagggggcttgcccccgatagcaatcttccagtcacaccctctacaactgacccactgccatcgggggcaagccccctcccacatttgaaccgtgttccttcaatagcatcgttatttgccgccactcccggccacgctttcaccgccgcgggtcaggtaataggcaccgagaatcgggaacatcgtcaccagcatcaccagcatcgccaccacattggtcaccggcacgtcgcgtgggcggctcagttggttgagcagccacagcggcaaggtgcgttcgtggccggcggtgaaggtggtgacgatgatttcgtcgaacgacagcgcaaaggcgagcatgccgccagccagcagcgccgagcccaggttgggcatgatgatgtagcggaaggtctgccagccgtcggcgcccaggtccatcgaagcctcgatcaggctgtgggaggtacgacgcaagcgggcgatgacgttgttatagacgatcaccacgcagaacgtcgcgtggccgacgatgatggtgaacatccccggttcgatgcccagcgtcttgaacgtcgccaacagtgcgataccggtgatgatccccggcagcgcaatcggcaggatcaacatcagcgacacgccttgcttgccgaagaactcgcggcgatacagcgccgccgaggccagtgtaccgaggaccatggcgatcagcgtggcgatggcggcgatctgcagcgacagcttgatcgcctccagtacgtccggccgcgcaaacgccacgctgaaccacttcagggtgaagccctggggcggaaagctgaacgcggcttcttcggtgttgaaggcgtagaggaagatgatcaggatcgggaagtgcagaaacaccaacccgccccaggcggcgatcttcaggcctagtgaggatttttcagagtgcatcgaaggcccccaggcgtttgacgatggacaggtaaaccgcgatcagcacgatcggcaccaaggtgaacgctgcagccatgggcatgttgccgatggcgccttgctgggcgtagaccataccgccgacgaagtagccgggcgggccgaccagttgcggcacgatgaaatcgcccagggtcagcgagaaggtgaagatggaaccggcggcaattcctggcaccgacagcggcaaaatcacctgcatgaaggtctggcgcggtttggcgccgaggtcggccgaggcttgcagcagcgagggcggcaagcgttccagggacgcctggatcggcaggatcatgaacggcagccagatgtagacgaacaccatgaagcgccccaggtgcgaggtgctcaaggtactgccgcccacgccggggatgcccagcacgaactgcaacaccggctccaggcccaggtgctgcacgaaccactgcgccacgccgcccttggccaacagcaaggtccaggcataagccttgacgatataactggcccacatcggcatcatcaccgcgatgtagaagaacgccttggtcttgcccgtggtgtagcgtgccatgtagtaggcgatggggaaggccacgatggcgctggcgatcgacaccacgatcgccatgctcaaggtgcgcacgatgatgtcgaagtttgacggctggaacagcgcggcgaagttggccagggtcaggtccggcgtgaccgccatggtgaagtcatcgaaggtgtagaaaccctgccacagcagggtcagcaacgaacccaggtagatcgcgccgaaccagatcagcggcggtatcagcagcatggccaagtacaggttgggcttgcggtacagcaggttggaaaacctgcgcatcggcgggtgggaaatagccaggctcatgtcacacctcgcctgcgctgtcggtcagcggggtcatggcttcgcgcgcccaacgggcggtgatggactggccgacctgatggccgctgctgatgtccagccactggttgttggcctggctgatgttcaacgcctggccgttttccagtttcagctcatagcgggtggcgctgccctggtactggatatcgtggagcaaaccgctgatttccacttcgccggcgcccagcgggccctcggcaaaccgcacgtgttccggacggatcgaaaacggctgcacgctgccgctgaggcgctgggccaactcgccgcgaatcacgttggaggtgccgacgaactcggcgacgaacgcggtggcgggtttcatgtagaggttgcgcggggtgtcgacctgctcgatgcgacctttgttgaatacggccacgcggtcggacatcgacagcgcttcggtctggtcgtgggtcacgaagataaaggtgatgcccaactggcgttgcagctttttcagctcgctttgcatctgctcgcgcagcttgaggtcgagggcgcccagcggttcatccagcagcaacacacgcgggcggttgaccaaggcgcgggccagggccacccgttggcgttggccaccggagagctgcaccggcttgcgctcgccgtagccgccgagggcgaccatggccagggcttcttcggcacggttgaggcgctcggtcttgcccacgcccttgaccttgaggccgtaggcgacgttgtcgcgcacattcatatgggggaacagcgcgtaatcctggaacacggtgttcacatcgcgctggtacggcggcaagccggcggcttcctcgccatggatacggatcgagcctgcgctcggctgctcgaacccggcgatcaggcgcaggcaggtggtcttgcccgagccggaagggccgagcatggaaaagaactcgccgtcctggatatcgatggaaacccggtcaacggctttcacttcgccgaactgacgggaaacgtgggtgaattggactgcaagcgtcatggtgcggtgctccgaaaaggcacgggtcgtcgcagcggcccggcctggacttctgaaaaaacaaaacatctgtgaatgcggtcaatgtgggagggggcttgcccccgatgactgtgcaccagtcgacacaagtgtgtctgatgtaccgctatcgggggcaagccccctcccacaggagacctatgttgtcttggagaccttagcggccgcccatgatcgcaatgtaatcctgggtccagcggctgtacggcacgaacttgccgccctccgcctgcggggttttccagaaggcgatcttgtcgaactgatcgaacccgttggtcttgcagccttcggcgccgagcagttcgcttgcctggcacgccgcaggcacggctggcagcgaaccgaaccaggcggccacgtcaccctggaccttcggttgcagcgaccagtccatccatttgtaggcacagttcgggtgcttggcctcggcgtgcaacatggtggtgtcggcccagccggtggcgccttccttcggaatggtcgaagcaatcggctgtttctcgttctgcaggccgttgacctgatacggccaggcgctggaggccaccacgccttcgttcttgaagtcactcatttgcacggtggtgtcgtgccagtagcggtggatcagcggttgctgggcgcgcagtaattcgagcacggccttgtactgggtttcggtcagttcgtacgggttctggatggccaattccggcttggtcgacttgaggtacagcgccgcgtcggcgatgtagatcgggccgtcgtacgcctgcacgcggcctttgttcggcttaccgtccggcaggttctgcgcgtcgaacagcacattccagctggtgggtgcggtcttgaatacgttggtgttgtacatcaatacgttcgggccccactggtacggcgtgccgtaggtttgctggccaaccacgtaccatggcgcgtctttcaggcgggggtcgatgttcttccagttggggatcagcgcggtattgatcggctgcacgcgcttgccgacgatcagccgcagcgaggcatcgcccgacgcggtcaccaggtcatagccacccttggccatcaggctgaccatttcgtcagaggtggcggcggttttcacgttgaccttgcagccggtttccttctcgaaaccgctgacccagtcgtaggccttgtcgctttcgccgcgttcgatatagccaggccaggcgacgatatccagttggccttcaccggcacccaccgccttgagcggttcggcggcctggaggctggcgctggccagcagcgcggtggtcagggcactgagcagtgcggtcttgtgcgcggacatgggggttccctcttctttaattatggtcggggcagtttttgaaccggtaacgcatgagcttagttgttgttttaaagatgctggccgtggcgcgccatgatgtgccgcaccacgctgtagtcctgcagcgaatcgctggacagatccttgccatatcccgagcgcttcaagccgccgtggggcatttcgctgaccagcatgaaatgactgttgatccaggtgcagccgtattgcaggcgcgaggccacttgcatggccttgtccaggttctgggtccacaccgacgaggccaggccgtattcggagtcgttggcccagtccaccgcctgttccagttcgtcgaagcgcgtcaccgtgacgaccgggccaaacacttcgcgctgcacgatttcatcgttctgtttgcagccggccagcagcgtcggctggtaatagaagcccgcgccggaatgcacggcggcgccggtgatgcgttcgatatgcggctggccgagggcgcgctcgacaaagctggccacgcggtcgcgctggcgtgtgctgatcagcgggccgagttcgttgtcggcgtcgcgcttgctggcaaagcgcaggctgctcacggcggcgccaagctcagcgaccagtttgtcgtggataccggcctgggcgtagatgcggcacgcggcggtgcagtcctggccggcgttgtagtaaccgtaggcgcgcacaccctcgaccacggcttgcaggtcggcgtcgttgcacacgatcaccggcgccttgccgcccagttccaagtgcgtgcgtttcaaggtcttggaggcggcctgcagaatcttctgcccggtgacgatatcgccggtcagcgagaccatgcgcactttggggtggctgaccagatggctgccaacgccttcaccgccgccacacagaatgttgatcacaccgcgtggcaacaactcgttgagcgccggggcgagggcgaggatcgacagcggcgtgtgttccgacggcttgaacaccaacgtattgccggcggcgagggctggggcgattttccacgcggccatcatcagcgggtagttccacggcgcaatcgaggccaccacgccaatcggatcgcggcgcaccatgctggtgtagcccggcaggtattcaccgctgagttgcccggtctggcaacgcacggcgccagcgaaaaagcggaacacatcgacggtggcgctcaaatcatcctgacgcgccaggtgcaacggtttgccgcagttcagcgattccaggcgggccaggtaatcggcttgtctttcgatggcgtcggcaatgcccagcaggatgttcgagcgttgctgcggcgtggtgcgcgaccagccggcaaaggcgcggtgagcggcgaggatcgcggtttccacctgctcggtgctggcttcggcgatctgggtgagcacttcacccgtggccgggttgaggatcggctcggcaaaaccctggccctggaccagttcgccgtcgatcagcaacgcagtaagcagcggggtgggcgcgccggacatttttcgcgatctcttttcttgtgtggccatgggcgttctcttacgagggcctgacctttctcttagggataagcagagactagaggtcaggcgcgaggtcaacaaatactaaatactgaatgcagcattcgattaaatagatggcttgcgcgggtgcggctgttcgcgggcgactgtcaggaatgggtccaccagcgccggacgcgccgtgccacggcgccaggccaggcccacgtcgagggtctggctgaggtcggcaatcggccgcgcttcgataatgtcgccctccagcgaccagggacggtaggtcatgtcgggttggatcgacacgcccaggcctgctgccaccaggctgcgcaccgcttcggtggaggcggtgcgcagggtcacgcgcggttgcaggccggcgctggtccacaggcgctgggcgttgtggcccatttcatcgacgttcagctggatcaacggttcgcgcgctacatcggccaggttgatgctgtcgtgctccagcagcggatgctgtgctggcagccaaagccggtgaggggagtgggtgagcacttcggtctgcagggcgtggcggtcttcgaggttggagaggatcagtacgcccacgtcgatttcaccgctgaccagcaaatgctcgatgtacggccgttcgtcctccatcacgcggatttccacgttggggtaggcgcgctggaagcgggtcagcaagtcggcgaggtagtaacccgccaccaggctggtcacaccgatgatcaactgcccggcgacctggtcggtgctctgctgcaggctgcgcttggcgttgtcgacggtggcgagaatcaagtgcgcctggcgcaggaactgatggccctggtgggtcagggtcatgcccttggcgtgacggttgaacaggttgacgccgatttcctgctccagttgctggatcgccagggtcagagtcgactgggagataaacgccgtctgcgcggcagcggagatcgagccggtctcggccacggcaataaaatgccggatttgacgcaaggtcatcatgctggaattaccagtggggtgtttttatagatttatccgagtgtatatcgatttaagcgaagggcgaccgcgttacatctggaagcactctagatcagggctttttggcacttagttttacgctgggggcctattggtcctatgaacccaagtgtctggaggctgcgaatgaatacccgtggattgctcgatcagttgctcaagtctggccaggacatgctgcaaaacaaggctggcggccagcgtaaacaggacgacaaaggtgcgctgggcggtctgctcggcggtggcggcctgggcagcctgctcgggggcgccggaggcggcgccttggcggcgggggccatgggcctgctgctgggcaacaagaaggcgcgcaaattcggcggcaaggcgctgacctacggcggtttggcagccttgggcgtcatcgcctacaaggcctacggcaactggcaggccaatcaggccagcgccccccagggcgagccacagaccatcgaccgcctaccgccggcccaggtcgagcaacacagccagggcatcctcaaggcgctggtcgcggcggccaaggccgatggccatgtggacgagcgcgagcgtgcgctgatcgaaggcgaattcaccaagctggacaacgatcgcgagctgcaaagctggctgcgcgccgaactcaacaaacccctggacccggccgacgtggcgcgagctgccggcaccccggaaatggcggccgagatgtatatcgccagcgtgatgctggtggatgaggagaacttcatggaaaaggcctaccttgacgagctggcccgccaactgaagcttgagcccggcttgaagctggaactggaaaaacaggtgcggctgaacgcgtaaagacggggcgtgcagcgatcaaaatgtgcgagggggcttgccccccgatagtggtgtttcagtctatttacagttggctggcacaccgccatcggggggcaagccccctcgcacatttgcattctgtggacgcttcatcaaaacccgttgattaatgaggccttctgctcagctatactcccctccatttgaatggccctccgaggaattactgtgaagaactggaccttgcgccaacgcatcctggcaagttttgcggtcattatcgccatcatgctgttaatggttgtggtctcctattcacggttgctgaagatcgaaaccagtgaagtcgcggtgcgcgacgacgcggtgcccggggtctacctcagttccatgatccgcagcgcgtgggtcgacagctacctgcaaaccctggagttgatcggcctgcgtgaagacaagggcctgaccgataccgacaaggccgacttcaagtcctatgaagcgcgcatcctgcagcagatggccaactaccaggcgaccatcagtggcggcgacgaccaggccgagttcgataaattcgaagcccagcaccaggcttacaacaaggcgctggctgccgtcgtagagcgcctgcagaacaacgatttggctggggcgcgcaagctgttcgatacgcagatgacgcccagctgggtcgcaggccgcatgaagctcaacgacatcatcaccgagaacaagaacgtcgccgaccgtgcgaccaacgcgatcgatgatgcagtatccgccgcgaaaatcagcatgtttgtgtcgctggccctggccatcctcgccgccggcctgtgcggcctgctgctgatgcgcgcgatcatggcgccgatgcagcgcatcgtcgatatcctcgaaaccatgcgcgacggcgacctgagcaaacgcttgaacctggagcgcaaggacgagttcggcgcggtcgaaaccggcttcaacgacatgatgaccgagctcacggccctggtgtcccaggcccagcgctcgtcggtgcaggtgaccacctcggtgaccgagattgccgccacctccaagcagcaacaggccaccgccaccgaaacggccgccaccaccaccgagatcggcgccacctcccgcgagatcgcggccacctccaaggacctggtgcgcaccatgaccgaagtgtccaccgccgccgaccaggcctcggttgccgccggttccggccagcaaggcctggcacgcatggaagaaaccatgcactcggtgatgggcgccgccgacctggtcaacgccaagctggcgatcctcaatgagaaggccggcaacatcaaccaggtggtggtgaccatcgtcaaggtcgccgaccagaccaacctgttgtcgctgaatgccgccatcgaagccgagaaggccggtgaatacggccgcggttttgccgtggtcgccaccgaagtacgccgcctcgccgaccagactgccgtggccacctacgacatcgaacagatggtgcgcgagattcagtcggcagtgtcggcgggtgtgatgggcatggacaagttctccgaagaagtgcgccgtggcatgtttgaagtgcagcaagtgggcgagcaactgtcgcagatcatccaccaggtacaggcgctggcgccgcgggtgttgatggtcaatgaaggcatgcaggcccaggccaccggtgccgagcagatcaaccacgccctggtgcaactgggcgatgccagcagccagaccgtcgagtccttgcgccaggccagctttgctatcgatgagctgagccaggtggcggtcggtctgcgcagcggcgtgtcgcgtttcaaagtctgatgagcgacctcgcggctaaacgcggcgccgtcccggcagcgaaaaaggcgttgttcctggtgttccacatcggcaatgaacgttatgccctcaaggccacggaagtggccgaagtattgccgtgcctgccattgaaaccgattgcccatgcaccgctgtgggtggcgggcatctttgcccatcgcggcgcgctggtgccggtgatcgacctcagcgccctgaccttcggcaccgccgcccaggcacgtaccagcacacggctggtgctggtcaattaccagcccgagccctggcgcgagccgcgttggctggggttgatcctcgaacaggccaccgacaccctgcgctgcgacccggcgcagttccagccctatggcctggacaaccgccaggcgccgtacctggggccggtgcgcgaagatgcgctgggcctgatgcaatggatcggcgtgaatgacctgctgaccgaagacgtgcgcgccgtgctgttttgccccgagttgagcctatgagccacgacccgcgtttctttgccttcctgaaagagcgcatcggcctggacgttgcctcggtcggcgaagccattatcgagcgggcggtgcgccaacgcactcaggcggccaacgcgcagacccccggcgaatattggcagcacctgcaaagctccgaggatgaacagcaagcgctgatcgaagcagtgatcgtcccggaaacctggtttttccgttatccagaatcctttgtgaccctggcccgcctggccaaggcgcgcttggccgagatcaagcagatgcgcgcactgcgcatcctcagcctgccgtgctccaccggtgaagaaccttattcgatcgccatggctttgctggatgccgggttggcgccgcatcagttcaaggtgcagggcctggatgtcagcccgttgtcggtggagcgcgcgcggcgtggggtgtatggcaaaaactcctttcgcggcggcgatatcgccttccgtgaccgccatttcaccgaacacagcgacggttatcacattgccgagcgcgtgcgcgaacaggtgcgcctgcaagtcggcaacctgctcgacccgacactgctggccaatgaggcgagctacgatttcgtgttctgccgcaacttgctgatctatttcgaccagccgacccagaaacaagtgttcgacgtgctcaagggcctgacccatgtggacggcgtgctgtttatcggtccggccgagggcagcctgttggggcgccatggcatgcgttcgattggtgtgccgcagtcgtttgcgttcagtcggcatgccgagccggtcaagcccgaaccggtgtttgtgcccgtgcctgcaccggtgccacagcgcagtgccgcaccgatcccggtcaagccgaggccgttcagcggtggcagtgcccaggtagtgccgatcaaggcaccgcacaccgatgcgggcgacttgctgagccgcatcgccaccctggccaacgaaggcaaaagcgctgacgcccgtgctgcatgcgaacagtatttgagtaaccatccgccggccgcccaggtgttctactggctggggttgctcagcgacgtggccggcagtgccctggaagcccagggttattatcgaaaagccttgtacctggaaccccagcacccgcaggctttgatgcacctggccgcgttgctcgaatcccagggcgacagtgcgggggcgcgccgcttgcaggcgcgggccgcgcgcagtgagcgagctgacagtgagtccaaacgatgagtaacaccgacgcgctcgataccgcagggctggacctgaccttggccgacacccaggccatcgacgattgctggaaccgcatcggcatccacggcgacaagtcctgcccgctgctggcggaccatattcactgccgtaactgctcggtgtactcggcagcggccacacgtttgctggaccgctacgccttgcagcaggacgcgcatcgcccgcatgccgtcgtggaactgggcgaagacgtggtcacccgctccctgctgatgttccgcctcggtgaggaatggctgggcatcgccacccgctgcctggtggaagtcgcgccgctgcaaccgattcactcgctgccgcaccaacgttcccgcgccttgctcggcgtggccaatgtccgtggtgcgctggtggcgtgcctgtcgctggtggaactgctgggcctggatgccaccagtaacggcgccagcggtgggcgcatcatgccgcgcatgttgatcatcgccgcgcaggatggcccggtggtggtgccggtggatgaagtcgacggcatccatgccatcgatgagcgcaccttgaaggccgcctcggtctcgggcacccaggccagtgcgcgctacacccaaggcgtgttgcagtggaaaggccgcagcttgcgttggctggacgaggcgcaattgttgtctgccgtgacccggagcctcacatgacccccgaccagatgcgcgatgcctcgctgctggaactgttcagcctggaagccgacgcccagacccaggtattgagcgcgggcctgctggccctggaacgcaacccgacccaggccgaccagctcgaagcgtgcatgcgcgcggcgcactcgctcaaaggcgcggcgcgcattgttggagtggacgccggggtcagtgtgtcccacgtcatggaggattgcctggtcagtgcccaggaaagccgcctgtatttgcaacccgaacatattgatgcgctgttgcaaggcaccgacctgctgatgcgcatcgccacgccgggcaatgatgtggggccggcggatatcgaagcctatgtggcgttgatggagcgtttgctcgacccgtcccaggcgcctgtcaaagcggcgcctgcgccagaaccggcacctatcgtcgaagcgccgctgccggagcccgaacccgagcttgcgctgccgatggtcgccgagccgccacgccagaacaaacgcatgaccgaaggcggcgagcgcgtactgcgggtgaccgccgagcgcttgaacagcctgctggacctgtcgagcaaatccctggtggaaacccagcggctcaaaccgtatctggccagcctgcaacgcctcaagcgcattcagagccagagcgtgcgcgcgctggataccctggacgggcaactcaagactcaacatctgcccctcgaagcccaggaagccctggccgacacccgccgcctgctcagcgaagcccaggccctgctggcggaaaaaaccgccgagctggacgagttcggctggcaggccggccagcgtgcgcaagtgctgtatgacaccgcgctggcctgtcgcatgcgcccatttgccgatgtgctggccgggcaagtgcgcatggtgcgcgacctcggtcgcagcctcggtaagcaagtgcgcctggagatcgaaggcgaaaagacccaggtcgaccgcgacgtgctggaaaagcttgaagcaccgctcactcatttattgcgcaacgctgtcgaccacggcatcgaaatgcctgagcaacgcctgttggcgggcaagccggcagaaggcgtgatctgcctgcgtgcctcccatcaagccgggttgctggtgctggaattgagcgatgacggcaatggcgtcgacctggagcgcctgcgcggtaccatcgtcgaccggcacctgtcgccgctggaaaccgccctgcgcctgagtgaagaagagctgctgacattcctgttcctgccggggttcagcctgcgcgacaaggtcaccgaagtgtccgggcgcggcgtcggcctggatgcggtgcagcatatggttcgccaactgcgcggtgcggtggtgctggagcagacggcggggcagggcagccgtttccacctggaagtgccgctgaccctgtcggtggtgcgcagcctggtggtggaagtcggcgaagaagcctacgcgttcccgctggcccatatcgaacgcatgtgcgacctggcgcccgacgacatcgtgcaactggagggtcgccagcatttctggcacgagggccggcatgtcgggctggtcgccgccagccagttgttgcaacgcccggcgggacagagtcagtcggacaccctgaaagtggtggtgatccgcgagcgtgatgcggtgtacgggattgccgtggagcgctttatcggcgagcgtacgctggtggtgctgccgctggatgatcgcctgggcaaggtccaggatatttctgccggtgccttgctggacgacggctcggtggtgttgatcgtcgacgtcgaagatatgctgcgttcggtggacaagttgctcaacaccggccgattggaacgcattgcccggcgcagccagcaaaccaccgaggcaccgcgcaagcgggtgctggtggtggatgactcgctgaccgtgcgcgaactgcaacgcaaattgctgctgaatcgtggttatgaagtggccgtggcggtcgatggcatggacggctggaacgccttgcgctccgaagactttgacctgttgatcactgatattgatatgcctcgtatggacggtattgaattggtcacactcttgcgccgtgacagtcgcctgcaatcgttgccggtgatggtggtgtcgtacaaggatcgcgaagaagaccgacgtcgtggactggacgccggcgccgactattatttagccaaagccagtttccacgatgacgccctgctggacgccgtagtggaactgatcggaggcgcgcgggcatgaggattgcgatcgtcaatgacatgcccctggcggtagaggccttgcgccgcgccttgagtttcgagcccgcgcacgaagtggtgtgggtggccagcaatggtcttgaagcggtgcaacgctgtgcagaactgaccccggacctgatcctgatggacctgatcatgccggtgatggatggcgtggaggctacccgccagatcatggccgagaccccgtgcgccatcgtcatcgtgaccgtcgaccgccaggccaacgtcagtcgggtgttcgaagccatgggtcatggcgccctggacgtggtggacacgccgaccctaggcgtgggcaaccccaaggatgcagcggcgccgctgctgcgcaagatcctcaatatcggctggctgatcggccagcgtggcagccgtgtacgcgccgaaaccgtcgcgccgcgcatgaccggcaagcgccagagcctggtggccatcgggtcttcggcgggtggcccggctgccctggaaatcctgctcaagggcttgccccgggactttcccgccgccatcgtgctggtgcagcatgtggaccaggtgttcgccgctggcatggccgaatggctgagcagtgcctccggcctgccggtacgcctggcccgtgaaggcgagccgccgcaaagcggcgtggtcctgctggccggcaccaaccaccacattcgtttactgaagaatggcacgctagcctataccgcagagccggtgaacgagatttaccggccgtcgatcgacgtgtttttcgaaagcgtggccagccactggaatggcgatgccgttggcgtactgctgactggcatggggcgcgacggggcccagggcctcaaattgctgcgtgaacaaggttatttgaccatcgcccaggatcagcacagctcggcggtgtacggcatgcccaaagcggcggcggcgattgatgctgctgttgaaattcgcccactggacaggattgcgccccgattgctggaggtctttgccagatgaacaaggcctctcgcggtgctggcttgcaggtagtaattcaggtgactgcacatgaatgatttacagatcgacgacatcaagaccgacgaaaatgccgccatggtgttgctggtcgacgaccaggccatgatcggcgaagccgtgcggcgtggcttggcccatgaagaaaacatcgacttccacttctgcgccgatccgcaccaggcgattgcccaggcgatccgcatcaagccgaccgttatcctgcaagacctggttatgcccggcctcgacggcctgaccctggtgcgcgaataccgcaaccacccggccacgcagaacatcccgatcatcgtgctttcgaccaaggaagatccgctgatcaagagtgcggcgttttcggcgggggccaatgattacctggtcaagctgccggataacatcgagctggtggcgcgcattcgctatcactcgcgttcgtacatgaccttgttgcaacgggatgccgcctatcgtgcgttgcgggtcagccaacaacaactgttggacaccaacctggtgctgcaacggctgatgaactccgatggcctgaccgggttgtccaaccgtcgtcactttgatgaatacctggagctggaatggcggcgtgccatgcgtgaccagactcagttgtcgttgttgatgattgatgtggatttcttcaagacctacaacgatagttttgggcatgttgaaggtgacgaggcgttgcgcaaggttgcggcgaccatccgtgaggccagcagtcggccatcggatttgccggcgcgctatggcggtgaggagtttgccctggtgctgcctaatacctcgccgggtggggcgcggttggtggctgagaagctgcgcatggcggttgctgcgttgaagattccgcacattgcgccgaccgagggggccagccttacgattagcattggtctgtccacgatgacgccgcagcaggggacggattgtcggcaggtgattgtggcggcggacaaggggttgtatacggccaagcataatgggcgcaatcaggtcggtatcgagtgacctgaagtcttaccccattcaatgtgggaggggggcttgcccccgatagctgtgggtcagtcacaacatcattgactgacaggccgccatcgggggcaagccccctcccacattgggatcttgatgggtcttgggttgtgtacaaatcctgccttttcgcccagcggactgccgctcccccccatttgccgttatactcgccggctttcaaaagttcgccaacgagtgctgcccgccatggaaatcaacccgatccttaacaccatcaaggacctgtccgagcgctccgaaactattcgggggtatctttgactacgatcaaaagcatgagcgtctgaccgaagtcaatcgcgagcttgaagatcctgctgtctggaacaaacctgaatacgcccaggaactgggccgcgagcgcgctgcgctggcgcagatcgtcgataccttagacgagctgaacaccggtctggccgattgccgtgacctgctggacatggccgtcgaagaaaacgacgaaggcgcagtgggcgatgtcgtcgccgagctggcccgtctcgaggaaaacctcgccaagctcgaattccgccgcatgttcagccatgaaatggacccgaacaacgcctacctggacatccaggccggttccggtggcaccgaggcacaggactgggccaacatcctgctgcgcatgtacctgcgttgggcggacaagcgcggtttcgaagcgacgatcatggaactgtccgccggtgaagtcgccgggatcaagggcgcgaccgtgcacatcaagggtgagtacgcctttggctggctgcgtaccgaaatcggcgtgcaccgcctggtgcgcaagagcccgttcgactccggcaaccgtcgccacacctcgttctccgctgttttcgtctcgccagagatcgacgacaaggtggaaatcgagatcaacccggccgacctgcgcatcgacacctaccgctcctccggtgccggtggccagcacgtaaacaccaccgactcggccgtacgtattacccacgtaccgaccaacaccgtggtcagctgccagaacgaacgttcccagcacgccaacaaggacaccgccatgaaaatgctgcgggccaagttgtatgagcaggaaatgcagaagcgcaacgccgcttcccaggcgctggaagacaccaagtcggatatcggctggggtcaccagatccgctcttatgtgctcgatgcgtcgcggatcaaggatctgcgcactaacatcgaacgcagcgactgtgacaaggtgctcgacggcgatatcgacgaatacctggaagccagcctgaaatcgggcctctaaagaaccttgtaggagcgggcttgcccgcgatccccagccgaaggctggggaaaacgtatctgtgatggaatttcaaaagacatgagcgaccaacaactcgacccgcaagccctgcaacaggaagaaaactccctgatcgccctgcgcaaggaaaagcttgctgccgagcgcgccaagggcaatgccttccccaacgacttccgccgcgaaaactactgcgatgccttgcagaagcagtacgcggacaagaccaaggaagagctggcagaggctgcgatcccggtcaaggtggcaggtcgcatcatgctcaaccgtggctcgttcatggtgatccaggacatgaccgggcgtatccaggtctacgtcaaccgcaagaccttgtcggaagaaaccctggcctcggtgaaaacctgggacatgggcgacatcatcgccgccgaaggcaccctggcccgttcaggcaagggcgacctgtacgtggaaatgaccagcgtacgcctgctgaccaagtcgctgcgcccactgccggacaagcaccacggcctgaccgacaccgaacagcgctaccgccagcgctacgttgacctgatcgtcaacgaagaggtgcgccagaccttccgcgtgcgttcgcaagtgatcgcacacatccgcagcttcctgatgaagcgcgacttcctcgaagtcgaaacgccgatgctgcagaccattcctggcggtgccgctgccaagccgttcgaaacccaccacaacgccctggacatggaaatgttcctgcgtatcgcgcccgagctgtacctcaagcgcctggtggttggcggcttcgaaaaagtcttcgagatcaaccgcaacttccgtaacgaaggcgtttcgacccgtcacaaccctgaattcaccatgttggagttctaccaggcctacgccgactacgaagacaacatggacctgaccgaagaactgttccgcgaactggcgcagctggtcctgggcagcaccgacgtgccgtacggcgacaaggtgttccacttcggcgagccgttcgtgcgcctgtcggtgttcgattcgatcctcaagtacaaccctgagctgactgccgacgacctgaacgacatcgacaaggcccgtgccatcgccaagaaagccggcgccaaggtgctgggcttcgaaggcctgggcaaattgcaggtgatgattttcgaagagttggtggagcacaagctggaacagccgcacttcattacccagtacccgttcgaagtgtcgccgctggcccgtcgcaacgacgacaacccgaacgtcactgaccgtttcgagctgttcatcggcggccgtgaaatcgccaacgcctactccgagttgaacgacgcggaagaccaggccgagcgcttcatggcccaggtggccgacaaggacgctggcgacgacgaggccatgcactacgacgccgacttcgtccgcgccctggagtacggcatgccgccgaccgccggtgaagggatcggcatcgaccgcttggtgatgctgttgaccaactcgccatcgatccgcgacgtgatcttgttcccgcacatgcggccacaagcgtaaccgtagcgaaatccgaagccgccttttataaggcggcttttttatgtggcgttaataagcgtcaagcaaacagcgccaggagatcgttcccacgctcggcgtggtaacgcataccgtgacgctctgcgtcacctaataaggaaatctgtcgtgaaccgcgtaaccgctcaagaaggcgccgccggcattgccgctgccgtggctgaaagcgtccagtaccagggccgcaaggccagtcgtcggggcagcgagcaacgcaggcaggacattctcgatgcggccatgcgcatcgtcgtgcgtgacggcgtgcgcgccgtgcgccatcgagcggtggcagcggaggcgggcgtgcccctgtcggctaccacctattacttcaaggacatcgatgatctgctcaccgataccttcgcccaatacgtcgaacgcagcgccgcgttcatgggcaagctgtgggtgcgtaacgaaggcttgctgcgcgaaatggtcgcctatggggatggcagccccgaatcacgctcacagttggccgatgatattgcacggctgaccgctgattacgtcttgcgccaattgaccaaccgccgtgagcacttgatggctgagcaggcgtttcgccaggaagccttgctcaacccgcgcctggcggagttggtgcgttcccatcaacagattctgttgcagggcaccgggcagttcttccaggtgctgggctcgcgcgagccgcaacaggatgccaaagtgttgacggcgataatcagtcggatggaatatcagggcctgctgggcagtgcagagcctctgaccggtgaagagatgcttgaaatcctcaagcgctatatgcatttggtgttggcctcggtctgacaccgggggatgcccaatgaaagcctggcgtgtggttgcaatcgccttgtcgttcctgctgctcagcggttgcctggtgaccttcaaggacccgctgccggcccatgacgccgcgccgccagccctgctgggccagtgggcgagcaaaaacgcctggggcgagccgctcaacctgcatatcagcgccgtcggtgaacaccgctataaagccgtgagctaccctacagccaagcccggccagcgtgacgaataccggtttaccgtttcgcgccatggcagccgctggtatttgtcggcgccgctgccggccaagctcggtgggcatttcatcctggcggggtttgagatcaacgaaaagcacgaattggtggtctacaccctcgaccttgagcagatccaccaagcgatagaccaacaggcgttgcacggcagcaccgtggacacggtcgagggcgccggggtgctggtcgacagccccttggaccaagtgtttgcgtacctggatgacccggccaatgccgatgtattcgtggaagccgtgcgctaccagcgcgcgggccaataacgtttaaagaggaagcaccgggtggacgattaccagcagacgatacgcaccttgtctgatcgcattgtgctggcgcaaacaccgattcgcgtcctcgacgccgtgaagtgggacgagaatattcgccaggggttcctcaaggccaagggcaaggaaatgccggcggtgagccgtgactattacctcaatcgaccgctgtcgttcgactccagcgcggtgaagctggagttccagaacatcgagcgcgacatcacccgtcgcctcggccagttcagcccggtggggcagatcatgcgccgcatgtgcaaggagtaccgcatggtggtgcgcatgctcgaagcgcgtggtaccgaggatttcggcctgatctcccaagaattgtacggcgctgcctccgatgcgtttcacgccggcgatccgaccctggctgacctggggctgatgctgtccgattatctgaacaatatagacggccgaggcgacttgaaggacgaggccaagaccctcaccgccaaggatgccgtcgccctgctgcaaacccgcctgaacaaggtatttggcgaggccgaagagaccatccgcgtgttcgagtccgacggtattgtcgctgacgccgcagcgggcgccgactacatcaagatccgcgccgacgcgatgttcaacgaccgcgacgtgcgcgccctggaagtgcatgaaggcctggtgcatgtgggcactaccctcaatggccagaaccagccgatctgcaccttcctgtccaaggggccgccctcgtccaccgtgacccaggaaggcctggcgattttgatggagatcatcaccttcgcctcctacccgagtcgcctgcgcaagctgaccaaccgcacccgtgccattcatatggtggaagagggcgccgacttcctgcaggtgttcgagttctttcgcgagcaaggcttcgagatggctgaaagctacggcaacgccagtcgtgttttccgtggttcggtgccgaccggtctgccgttcaccaaggacctgtcctacctcaaaggctttatcatggtctacaactacatccagctggccgtgcgcaaaggcaagctggaacaagtgccgctgctgttctgcggcaagaccaccctggaagacatgcgcaccctgcgccaactggtcgatgaaggcctggtggtgccgcccaagtacctgccagagcaattccgcgacatgaacgcgctggcggcctggatgtgcttctccaacttcctcaaccacctgagcctggatcggatcgaggcggattactccaatatcctttaaaccgtgctattcgcgaggcttcaacggatgagaatcctcggcattctgtgcctgctactcacattgaacggctgcagttccctgctgttctaccccgagcccggcctgccgttcacgccggaaaaagctcatcttcaataccgtgacgtcaccctcaccactgccgacggtgtaaagctcaacgcctggtggctaccggccaaacccggcgtgccactcaaggggacggtgctgcacctgcatggcaacggcggcaacctggcctggcatctgggcggcagctggtggttgcccgagcagggctaccaagtgctgttggtggactatcgcggttatggcttgtcggaggggaagccgtcattaccggcgatctatcaggatgtggacgcggcgttccaatggatcgacaaggcgcccgaaacccagggccagccgttgatagtgctgggtcagagcctgggcggcgcattggcggtgcactacctggccgcccacccggagcgccaatcgcggctcaaggcgctggtgctggacggcgtgcccgccagttatcgtgacgtaggacaattcgccctgagcacctcctggttaacatggccgtttcaggtgccgttgtcctggctggtcccggacgccgacagtgccatccatgccatgccccagctgacaggtgtacccaagctgctgttccacagcctggatgacccgatcgtgccggtgaccaacgggatccgcctgtaccaggccgcaccgccacccagggtgttacagctgacccgaggcggccatgtgcagacctttgccgacaagacctggcaaaccgtgatgctgcgttacctggatgaccctcagcacttcaatggactgcgccgcctgggcgaaatcccgaattacccgattcctaacgttgactcatcagagagcccgcaatgagcgaagaacgcaacatgatcccgctgatcctcaccggtatcggcaccatcatcggtactgtcggttgcctgtggtactacggctacctgcacttcgccaagccggaagatgcgttgttgctcagcgacttcaccatgctcaagaccgtgcccggcgaggactacaagatctccctgacgccagccgcccaagtggcgcaatgcgtggatggtgtactggtgatgttcgacactgagcagaaaggcctgagcggtgtgctggtgaataacaagaagcaggccgtgcgatgcatggggcaggaaacaccacaactccagcagtaagccggatgtaccgcgcctgaaatatctggaaccgttttgcgtaacagaccactcattggcgtgtcagcgttcatggtgagatttgcgaaccgccagccaggggagtgtcatggtcaagttgggtgagataagtgcgatagacaggtggttggagatgtccaggatgcaggagctcgttgaagcgctccgtggaggcgtcgacgataccgcgcaaaaggagcagggggagcagtgccaagagaaaccaggctatgcaggtttcgagagcgacaagtgtccaatcaaattctaagtgtaaaaaaacccaccgtttctggtgggttttttctatccaaacaatcagttagcgacggacgaccgtggcttgaccggctggttgtcattggagatggttacttcgacgcgacggttcatggcacgaccagatacgctaccgttatcggcaaccgggtattccttgccatagccctgggtcacgatgcgcgagatatccacgccctgttgtgccagtgcacgttgtacggaggctgcacgacgctcggacaggctctggttgtacgaatcggaaccggtgctgtcggtgtagccttcgacgatcaccttacggtccgggttatcgcgcaggaactgcgccagcttggtgatgttcaccaggccgctggatttcaggtcggacttgttggtggcaaacagcacgtcaccgaaggtcaccagggtgccgcgatcagtctgcttggcgttcaagctgtcctgcagttgcttgatctgcgcatcacgggcgtcgagcagggcgcgggcgcgttcgtcaccggcgtttttcagcttggcttcggattcgcgcagcacgatggtgtctttggctacttcaacgcgctggttggtcaggtaggccagttggtcgaccttcttctgatcttccttgtcgcggtatgccttgtcagccttgtccagccaatcgctggcgtctttggtttccagcgccgcgagcttggtggcctgcgggttggtctgcagggacgagaagttggtccgtgcgttttccaggttcgcgttaggcggggtggagcaggccgccagggcaacgctcatcgccagcagggcagggatcatcaattgtttacgcatagtcgtgtcgtcctttcaattcgatatcgggtgcaatgcaatcaggggcggcttatttctgctggatagcagccgggcgcatgccttcctgacgcagctcctgaacagctttctgggagtccttcacagcctgttcggccttagcggcctgggatttacgctcagcgacacgagcgtcccactcggcttgttcggccaggcgacgggcttcgtcgtagttcttgtcgtgcatggcaatctcggcttgcttgagcttgtcctgagccgacttcatttctaccgctgcgtactcggtgccgccggcgctgacagcgctgttcaccgcagattgggtcacggcgtactgctcggtcggagggttgccggcgcagcccgccagaacgaagctggtgccgattgccagcgcggccaatttgagcccgcgcaggtggttaaacgaggatttggcagtgctggtcttcatcgtcttcaactccattggataactcctgaaaaacatcaaaatccatgtcactggtctgcggctgggggcttggtactcacgcacaaattgccctttaaaacggccgttccaagtgatggcttactggctgtgaccggaggcttttttcaaaagttcagagaagatggcgatttgcctaaaaaaatatctgactgtttggtcagcgaaaaaacttggaacttctgcgttgcgcagcggtacgccgggctcctaaagagcccggaatacagggggtttgcgctagggtttcagtgtttcggtttgtcgccactcgctgataagtcatgcagatagcgacgcgacagcgtcagaaagcgcggagtagggccgacatcttcatagagcgggtcgccctcttcatcggtggcgatcacctgctgccccttgatgtatggaaagctggcttccagctcttccagtgcggcgccgatcagttcgccgagcagttcttcggtgctgcgcttggggtacatctcggcgatcgctgccaggcgtgccgcagcttccacatccagatggatggcgtactcggtcttggtcaggcgacccttggcattctcttcccagtgctgggccagttctcggattttcatggcaacctcaataaagctcgcgatagcaggcggtgatgagtgacccgccgtccgcgtggataaacgcggcgacttagtgttgagactagctgcaactcacaaggtttaaagtcttgtcataaatgagcgctggcggcactctggcaaacctgcgcgtcccggatttctggctggagattggctgatgagtgatatcgatgcacgcttgcgtgaggatgttcacctgctgggtgaactgttgggcaacaccattcgagagcagtatggcgacgatttcctcgacaagatcgagcagatccgcaagggcgccaaggccgaccgccgtggcgcaggcgatgaactgagcaccagcctcaaccagttgcaggaagatgaactgctgccggtggcccgtgctttcaaccagttccttaacctggccaacattgccgaacagtatcagctgattcatcgacgcgatgagtcgcaaccggcacccttcgagtcccgtgttttgcctgagttgctggcgcggctgcaagccgaaggccacagcaacgaatccctggcccggcaattggggcgcctggagattgagctggtcctcaccgcccaccccaccgaagtggcgcgccgcaccctgatccagaagtacgacgccatcgccgcccaactggcgctgcaggatcatcgcgacctcaccacggccgagcgcgagcagatccgccaacgcctgcaacgcttgatcgccgaggcctggcacaccgaagaaatccgccgcacccggcccacgccggtagacgaagccaagtggggctttgcggtcatcgagcattcgctgtggcacgcgattcccaattacctgcgcaaggccgaccaggccctgcacgctgccaccggcctgcgcttgccgctggaggcggcgccgatccgctttgcgtcgtggatgggcggcgaccgtgacggcaacccgaatgtcactgcaccggtcacccgcgaagtcttgctgctggcgcgctggatggctgccgatctgtacctgcgcgatatcgatcacctggcctccgagctgtcgatgcagcgcgccagcccggcgttgcaggccaaggtcggcgatagcgtcgaaccctatcgcgccttgctcaagcaattgcgtgaacgcctgcgtgccacgcgccaatgggcgcatacggcgttgagcagtagcacgccggcacctgccgaggtgttgcagaacaaccgcgatctgctcgaaccgctggagttgtgctaccagtcgctgcacgaatgcggcatgggcgtgatcgctgatgggccgttgctcgactgcctgcggcgggcggtgactttcggcctgttcctggtgcggttggatgtgcgccaggattccagccgccattgcgcggccatgaccgaaatcaccgattatctcggtctgggtcgttacgaagactggaacgaagagatgcgcatcagcttcctgatgaaggagctggccaaccgtcgaccgttactgccgggttatttcaaaccgtcggcggataccgccgaagtgcttaacacctgcaaggaagtcgccgccgcccccgctgcgtcgttgggctcgtatgtcatctccatggccggcgctgcgtcggatgtgctggcagtgcaactgctgcttaaagagtcgggcgtgcaacggccgatgcgtgtggtgccgctgtttgaaaccctggccgacctggataacgcaggcccggtgatcgagcaactgttgctgctgccgggttaccgcgcgcggctgcaaggcccgcaggaagtgatgatcggctactcggactcggccaaggacgccggcaccaccgccgctgcctgggcgcagtaccgggcgcaggaacgcctggtggatatctgccgtgaacagcaagtggaactgctgttgttccacggccgtggtggcaccgttggccgtggcggcggcccggcccacgcggcgatcctgtcgcagccaccggggtcggtggcgggacgcttccgtaccaccgaacagggcgagatgatccgcttcaagttcggcctgccggatattgccgagcagaacctcaacctttacctggccgctgtgttggaggcgaccctgttgccaccgccgccgcctgaaccggcctggcgccatttgatggacgaattggcggcagacggggtcagcgcttatcgcgccgtggtgcgcgagaatccgcagttcgttgagtatttccgccaatccacgccggagcaggaattgggccgcttgccgttgggcagccgcccggccaagcgccgagcgggcgggattgaaagcctgcgtgcgattccgtggatcttcggctggacccagacccgcctcatgctgcccgcctggctgggttgggaagcggcgctgagcaaggccctggaacgtggcgaaggcgacttgctggggcagatgcgtgagcagtggccgttcttccgcacccgcatcgacatgctggaaatggtgctggccaaggccgatgccgatatcgcccgcctgtatgacgagcgtctggtgcagccggacctgttgccactgggtgcgcatttgcgcgacctattgtcgcaggcctgcaaggtggtgcttggcctgactggccagtcgcagctgctggcccatagcccggacaccctggagttcatccgcctgcgcaatacctacctcgacccgctgcacctgttgcaggccgagttgctggcgcgctcgcgccagcaggaagcggcacaggacagccctctggaacaggcgctgctggtctccgtggccggtattgccgccggtttgcgtaacaccggctaaggttttttgcgtgttctcaacggcttgcagataaaccacggcggccgccctgaaacgggcggccgccgattgtgcggccaggttgcacccaggcgcaccctacctatgacgtataggcagcacgggttcctgcgacttttggcggcttgtgtgcttaaggcctgctgtgtatcttgatcagcctttggccgtttgggcggcccgaattctatttttacgcgattggcccgccgcggcgaatccgagcgtcatctctataaaaaattgaggagcacatcaatgcgcgtcattctgctgggagctcccggggccggtaaaggtactcaggcaaagttcatcactgaaaaattcggcattccacaaatctccaccggcgacatgctgcgtgcggccgtcaaggccggcaccgagctgggcctgatcgccaagagcgtgatggacagcggtggcctggtttccgatgacttgatcatcaacctggtcaaggaacgcatcagccaggaagactgcaagaacggtttcctgttcgacggcttcccgcgcaccattccccaggctgaagccctggtgaaggcgggcgtcgagctggatgccgtggtcgaaatcgcggttgaagacgaagaaatcgtccagcgtattgccggtcgtcgcgtccacgaagcctcgggccgcgtgtaccacaccgtctacaacccgccgaaggttgaaggcaaggacgacgtcaccggtgaagacctggtgcagcgcaaggacgacaccgaagaaaccgtgcgtcatcgcctgtcggtctaccactcccagaccaagccgctggtggacttctatcagaagctgtccgccgcccagggcaagccgaagtacagccacattcctggcgtcggctcggttgaagcgatcaccgccaaagtgctgcaagcactgagctgatcccgcgaccggcttcacggataacggcccgcttgcgggccgttgttgtttatactggcgcactttttttcgacttggacacctacaccgatgagcaccctgctggccctggacaccgcgactgaagcttgctccgttgccttgctgcacgatggcaaggtaacgagccactacgaggtgatcccgcgcctgcatgcgcagaagctgttgccgatgatcaagcaactgttggaagacgccggcaccacgctggctgcggtcgatgccatcgccttcggccgcggcccgggtgcattcacgggggtacgtatcgccatcggcgtggtgcagggcctggcgtttgcgctggagcgtccggtgttgccggtgtccaacctggccgtgctggcccagcgcgccttgcgtgaacatggcgtccggcaggtggcggccgctatcgatgcgcgcatggatgaagtgtattggggttgctaccgcgaaacggcgggcgagatgcgtctggtcggtgtggaagccgtgcagccgccggagtcatcgcaattgcctgccgacgccagcggcgattggtttggtgctggcaccggctgggggtatggcgagcgcatcgctgtgccgctggtgggccaggacgcgacgatgttgcctcacgccgaggacttgctgacattggcacgttttgcgttcgagcgtggcgaggccatcccggcggaccaggcggcgccagtctatctgcgcgataaagtggcgcagaccaaggcagagcgcgggattatttgacgccaaaaatgatggcaatttggggctaaattcaccaatcgtcagaatttgcccctggttttaaacctttttcaaattatgtgttctagttatcaccagagcatttgcgcgctacggattgcgccactaaaatgccattactgatagcgagttcgcgcccatgcgtattgatggcttttcctcacagtcttacccaatcaagcgcaagccgcgtaaggcgaacgtcacggtggacgactccgtcgaggactcgccggacttcatcgaagtccaagccgatgcacaggccagcgcccaagcgcgtatcagcggtcttcccgctcgtcagcaagacatggtcttcccgcgctccatgagcaaaagcgtcgctaccgccctggccagctacctgaccaccgccggctttgtcgaatgggatatggaagtgctgggcctcgacatccacatctgatgcgtctgccttactacctcggttgcccgtcctggagtgaaaacgcctggcgtgaatacctgtatcccgccgatgcccgttccagcgactacctcgcgctctattcccaggtcttcaacgccgtcgaaggcaacaccacgttttatgcccgcccctcagccgccaccgtgcagcgctgggccgaaatcatgcccgacgacttccgcttcacggccaaatttcccggtgacatcagccacagcggtaacctgaccgagcagctaccggcagcggaaagcttcgtgggcctgatgagtccgttgggtgagcgggtatcgccactgtggttgcaactgcccgcgtcgttcaccccgcagcgcctgggggagttggcgggtttcatcgatggcctggagcggccgatggcggtggaagtgcgccacctggaatttttcgccaagggggacgccgagcgcatgcttaaccgtttgttgcgtgaccgcggcgtggagcgcatctgcctggatccgcgcgcgctgttcagttgcacgtccacctcggccgccgtgctgcacgcccaatctaaaaagcccaaggtgccaccccgtccggcggcgctgacgcagtttccccaggtgcgctttatcggccatcccgaactggaggccaacgatccgttcctgaagccatgggtggaaaaagtcgctggctgggtcgaagaagggcgcaccccctacgtgttcctgcacacctcggataaccgcctcgccgcgcaactggccctgcgtttccacgatcaactgatggcacgcctgccaggcctgccgcccttgcaggtgttggatcgcgctcccgccgtggagcaactggggttactctagggttcctttttccgccaggagcccgacatggatgcccaaacccttcgcgccgaaaccttcaaggccttgcatgagcgcgaccgtgcgttcgtgatgcctaacccgtgggacgtaggctccgcggtgatgctggccagcctgggtttcgaagcactggccaccaccagtgcgggttacgcgttcagccttgggcgcccggatgcggaaggcgcgttgtccctggacgacacgttggtcaatgccggcatgatcgccaaggctaccgcgttgccggtggctgccgacctggaaaacggcttcagcgacacacctgaaggctgtgcccagaccatcctgcgtgctgcgcaagtcggcattgtcggcggctccatcgaggacgccacgggcattgccgccgacccgatctatccctttgacctgtccgtcgagcgcgtggaagccgccgtcgccgccgcccgcagtctgccatttcccttcaccctgacggcccgtgcggaaaacctcctgcatggccgcctggatttgcccgacaccatccgccgcctgcaagcctacgccgaagccggggccgacgtactgtatgccccggccctgcgcagtgccgaggaagtgctggcggtggtcaaggcggtggcgcccaaaccggtgaatgtgttgatgtccggtggcttgaacctgagtgtcgcgcagttgagcgagatgggcgtgcggcggatcagcgtcggctcggcgctggcgttggcggcctacggcgagttctaccgcgccgcgcaggaggtgtatgagttgggcacgtttaccttcaccgagcgcaagatgccgttcagccaggccaaccaattcttcaagggctaagcggtgcgttttttcaaagtgctgggcctgctgctgatcctggcgggtgccgttgccgtgggtgtctggcgtggatgggtgccactaccggccgattggaacccgtgggcaccgctggacgtacgcgccaaccccaacttcttgactcgctacaagctgggccgtctacagggtgacccggcactgtgcgaccgggtgctgcaaacctcgggcctgcgcgtcagtcatcaggcggactcgccggcagatggcgcttgccccttgcgcaataccttgcgcgtacagggttctgcggttgggctgagcagtagctttctcgccagttgcccactggcggtggcgttcgccctgtttgagcggcacagcttgcaaccggcggcccaggcggtattcggccaggcagtgacgcgggtcgatcacctgggcagctttgcctgtcgcaatatctataaccgtgccgaagggcgactcagccagcatgcgtcagccaacgcgctggacattgccggttttcgcctggcggatgggcgcagtatcagcgtgctcaaggactggcctggggagggcgataaggcacggtttctgcgtcaggttcgcgatagcgcctgtgatgatttcaatgtagtgctcagccctgaccacaacgccgcgcaccgcaaccatttccatctggatatggggcgttggtgggtgtgtcgctgaggctcaggcggccaagcgcaggttctgggtgaccagtgggcgagcccagtagtagtcgaagtccagggctttttgttgcgcgaccagttcttcggttggatacggcgtggcggcgggtggcagcaggtccagttcgaattcggcgatgggcaggtgcagagggcgcggctcaggggctggacccggctccggcagcggctggccggccgttaacacgatggggcggacccagccgctttcgaaattctgctggcgttgctgggcgacgatttcttcttccgggaacggtgtggcggcgggtggcaacagctcggtttcgaactcggcaatcggcaggaacagcggctccggtggagcaatctcggtgtctttcacatcgcactcacgctgggtgaggatctgcgacaacaggtcggcgccggcgctgggttctaccgctgggtccgccggtgctggcgcctgcacggcgagcgcgtcgggcgtctcgccaagctgctcggccaaggccctggcgaagaagtcctgccacacatgactcaccccggccagcgcttgagtattgcgcaggccgtagtggttgtgggtcggcagtacaccgatggttaggggaagaatgtctgacatttttctcggtcgacgctcagctctggcaaaatacctgactgttgtttttatcggccgctgtttgccgatccttaatatttttgagcgtagcgattgatgagcgaacaaccagcgaccagccgcatccaggtcgaggccttgggcgaggttttccaggcccgcgccgagcaatgggcgcagcggcttggcttgcctttgcagcaggcagatgcggacttttccctgcaagtgggggagcatggcctgcaattgcaacagctcggggctgacgcgccagggccggtgcgcgtggattttgtcgaaggcggcgcggcgcatcggcgcctctatggtggcggtagcgggcagatgatcgccaaggccgtgggcatcgcccaaggcgtgcgcccacgggtgctcgacgctacggctggcctgggcaaggacgccttcgtgctggccagcctgggttgtgacatgagcttgatcgagcgtcagccgctgatcggcgccttgctcgaagatggcctggcgcgcggcgcggatgattttgaagtggcaccgattgtggcgcgcatgaagctgctcaagggcaactccatcgacgtgatgcgccagtgggagggcgagccgccccaggtgatctacctcgacccgatgttcccgcaccgtgagaaaactgccctggtgaagaaggaaatgcgcctgttccggccgttggtgggggatgatcccgatgcgccggcgctgctggctgccgccctggccctggctagccaccgcgtagtggtcaagcgcccgcgcaaggcaccgtgcattgacgggccaaagccgagccatgcgctggatggcaaatccagtcgctatgacatttatccgaagaaagcgctcaaaccctaagattgaaaatgccctgtggcgagcgtgcttgccacagacaatgggttacggcctgtaggcccgcataaacaaccccaccacctcttgcacatgggcttcggcggcttcttcactcagttgcccgccgcagccatacagcaagcagaaattcgccgtgcccttgagcaggcagaagaaatgctcggccgccgtaaagggtttgtcgatgctcagcgcaccactctggtcgatcttgccaagcagtcgctccataccttgcagcatgcgcatggggccggcctcgaagaagatctgcgagagtttcacgtcctggttgccggtggtcatcatcaagcgatgcaggttgaccgactcttcactgttgatcagccgatggaacccccgcgcgatattcaacagcacagtttgtacgggtatgccctcgggcaactcgaagtacatcaccggcagttgttcttcgcacttggccaccaccgcggcggtgaacaaggtctctttatcgttgaagtggctatagacggtcagtttcgacacgccagcttccagtgccaccgcgtccatgctggtactggcgtagccattgctcaaaaacaggattttcgctgcttcgaggattgcctggcgttttgccatgtccttggggcgcccggggctattggtgttcagaggattgtcggacattttcacctttaatactggactggcgagtttggtattaataccatacccgccagtataattattcctagctctacttgcgaaaggtcctacagcatgcgcagcaccttcctgccctttgctttgcctgtcagtttggtcgtgctgttgaccgcctgcggccatgaagaagcggcccagattaccatccgcccagccatggtggtgcagcctcagccttcttcgcagtcgatggacagctaccccggcgaagtgcgcgcccgctatgaaccggacctggcttttcgcatcggtggcaaagtcagcaagcgtttggtggaggagggcgaacgggtcaaggccaaccagccgctggcggagctggaccctcaggacgtgcgcctgcagctggaagcgacccgcgcccaggttgccgccgccgaggccaacctgagcctggtgcggaccgagcgcgaccgctacaagaccctgatggaccgtcagatggtcagccgttcccagtacgataattccgaaaacctctaccgatccggtgaagcacgcctcaagcagatcaaggccgagttcgatgtggccagcaaccaggccggctatgccgtattgcgtgcgccccaggacggagtggtggccaagcgtgcggtggaggtcggccaagtggtgtccgccgggcaaaccgtgttcaccctggctaccgatggcgagcgcgaagtgctgatcagcctgccggaacaaggttttggccggttcaagatcggccagccggtgtcggtagagctgtggagccagccggatcagcgttttaccgggcgtattcgcgagctgtcaccggcggccgatcccaagtcgcgcacgtttgcggctcgcgtggcattcaccagcggcaaggtcccggctgaactgggccagagcgcacgcgtattcatacaggtcgacggcgatgttccgttgtcagtgccgctgtctgccctcagtgcggagaacggtgcgtcctacgtgtggcgcgtgcagcccgacaacacgctcaaacgcacgccggtgcgcattggtgccttcggtgaaaaaaccgtcccggtcctggaaggcctggccccgacggattgggtgatcgctgcgggtgtgcacgtgcttcacgagggccagcaagtgcgcccggtggaccgctccaaccgtgtggtgaatctggcggccaaggagtagtccccgatgggtttcaatctttccgaatgggcgttgcgcaatcgccagatcgtactgttcctgatgatcctgctggcagtggtcggcaccttgtcctactccaagctggggcaaagtgaagacccgccgttcaccttcaaggccatggtcatcaagaccaactggcctggcgcaacggcgcaggaagtctcgcggcaggtcaccgaacgcatcgagaaaaaactcatggagaccggcgagtacgaacgcatcgtctctttttctcgcccaggtgagtccactgtcaccttcattgctcgcgactccatgcactctgtgcagattcccgaactgtggtaccaggtgcgcaagaagatcagcgacatccgccagaccttgccgccggacattcaggggccgtttttcaatgacgaattcggcaccaccttcggtaatatctacgccctgaccggcgacggtttcgactacgccgtgctcaaggactacgccgaccgcatccagattcaactgcagcgcgtcgcggatgtgggcaaggtcgagctgctcggcctgcaggacgaaaagatctggatcgagctgtccaacctcaagctggccaccctcggcttgcctttggcggcggtgcaacaggcgttgcaggagcagaacgcggtctccactgcgggcttcttcgaaaccccgagtgaacgtgtgcaactgcgtgtatcgggcaacttcaagagcgtggaagagatccgcaatttcccgattcgcgtgggtgaccgcaccttccgcatcggcgatgtggccgacatccaccggggtttcaacgaccctccggcaccacgcatgcgttacatgggcgcagacgcgattggcctggccgtggcgatgcgcgacggcggtgacatcctggtgttgggcaaagccctggaaggtgaattcgcacgcttgcagaagaacctccctgcgggtatggagttgcgcaaggtgtcggaccaaccggcggcggtgaaaaccagcgtcggcgaatttgtgcaggtactgaccgaggcgctggccatcgtgttgctggtgagtttcttctctctcggcgtgcgcactggcatggtggtggccctggcgattccgctggtgctggcgatgacgtttgccaccatgtattacctcggcatcggcctgcacaagatttccctgggcgcactggtgttggcgttgggcctgctggtggacgacgcgatcatcgccgtggagatgatggcgatcaaaatggagcagggctatgaccggctcaaggccgccagctttgcctggaccagcaccgcgttcccgatgctcaccggtacgctgatcaccgccgccggcttcctgccgattgccaccgcgcagtcgagtactggcgagtacacccgttcgattttccaggtggtgaccattgcgttgctcgcttcgtgggtggccgccgtggtgtttgtgccttacctgggggaaaagctcctgccggacctggcgaaaattcacgcagccaaacatggcaccgatggtcctgatccctacggcacacctttctaccagcgcgtaagacgtttggtggagtggtgcgtgcgtcgccgcaaaaccgtgatcgtcctgaccctgttgctgtttatcggctcggtcgccctgttccgttttgtgccacagcagttcttcccggcctccggtcgcctggaattgatggtcgacctgaagctggccgaaggcgcctcgctgagcaacaccgctgaccaggtcaaacggttggaaacgctgctcaaggatcacgccggcatcgacaactacgtggcctatgtcggtactggatcgccgcgtttctacctgccgctggatcaacaactgccggccgccagttttgcccagttcgtggtgctggccaaaaccatcgaagagcgcgaaagcctgcgcacctggctgatcgaaaccctcaacgaacaattccccgacctgcgttcacgggttacccgcctggaaaacggcccgcccgtgggttacccggtacagttccgtgtgaccggcgaacatatcgaagaggtccgcgcgctcgcccgtagagtggcggccaaggttcgtgaaaaccctcacgtggtcaacgtgcacctggattgggaagaaccgagcaagatcgtctacctcaatatcgaccaggaccgcgcccgtgcccttggcgtgagtacggccaacctgtcgaaattcctgcagagttcattgaccggctccagcgtcagccaataccgcgaggacaacgagttgatcgaaatcctgctgcgcggcaccgttcacgaacgcaccgaactctcgttgctgccgagcctggctgtgccgacggacaacggcaaaagcgtcgcgctgtcgcagatcgccaccctcgaatatggcttcgaagaaggcatcatctggcaccgcaaccgcctgcctacggtgaccgtacgcgccgatatctatggcaaggaacagcccgcgacattggtccagcagatcctgccgaccctggaaggcgtgcgtgccgaactgccggatggctacctgctcgacgtgggcgggaccgtggaggattccgcccgtggacagaactcggtgaaagccggggtgccgctgtttatcgtggtcgtgctgaccttgttgatgctgcagttgcgcagtttctcgcggaccgcgatggtgtttctgacggcaccgctgggcttgatcggggtgaccttgttcctgctggtattccgccagcccttcggtttcgtcgccatgctcgggaccatcgccctgtcggggatgatcatgcgtaattcggtgatcctggtggaccagatcgagcaggacatcaaggcggggctggcaccgtggcaagcgatcatcgaagccaccgtccgacgcttccgcccgattgtgctgaccgccctcgcggcggtattggcgatgatcccgctgtcgcgcagtgtgttcttcgggccaatggccgtggcgatcatgggcgggttgattgtggcgactgcgttgaccctgctgttcttgccggccctgtatgctgcgtggttccgagtgaggaaggacgtcgcgtaatcatgctggccaccgtttcagccctgatgttgttgttgcttgccccaggccctaccaacaccctgttatttcgtgcaggtgtgttgtgtggcttgcgggcttcgtggaggctggcatttgtcgagtgcctggcgtacctgctgcaagtttcggtatggggcgtggcattgctgtatctgtcggcgtactcgccatgggcgctgaaggcaacgcaattggcggcagcctgctacttgctctatgtctcctacaagctttggcagcgtaagaacagtgtcatccaccccggttccgaccgtttctccgggctgtacttcttctggctgacggtgatgaatcccaagggattgctgatcgtgtcattcattgcaccgttcggcacctttgccacgctacccggctatgccgggttcatggccacgctggtgctggtggtgattccagtgggggcggggtggatcatgctgggcagccgctttgaaggaattcaaaaggcctggctcacgccattgaagatcaaccgtgcgacctctattgcgattggctgctttgccacgctgatggtggggcggttggcggaatcgatggtgaattgagggagcgcgcgtctcagatttgatgtttattgagatagttgcagttttctgctgtactcaagtctcagaaatcgaaaaattgagattttgatgatcaagttgccaccgagggtgccggaaggggttttcgttttaattggccaggaaccccatcttcagcatctttctgactatatgaagctgactcagccaaccgatagccaggggcgttacttacactttgatcaactacgtcaccgcttcccaaagcatttggatcaggcgatatgctggggcatcgtaaaatacgagcgctctcgtctgtaccagcaaatattgcccgtcggtacgcctgaggcctggtgcaagtttttactgacaccgaccgcacagcgcgtggtatccacggtcgacaggtacgcctcaactgcagcacttgagtacatgagcagcaagattgggaaggccgctcacatcaagtatctgctcaatgatttgattgaagatgaagccatcagcagcagtcagctggaaggggcagcaaccacgacgctcgtagcaaaagatatgttgaaaagagagcggctacccagaacacccgatgaaaaaatgatcattggtaattaccggatgatgcgtttcgcttgggataagagaaacgctcctctcagtgccgaactgatcgctgaaatgcatgaggtgggtgttcaaggcattgacgatgacaaatattctcccggcagctttcgtctaaatgatgacgtagttgtccaagatggtgatagcaatgtggtccatacgccccctcctgcagaaggcatcgccaaaagattggggcgattagctgactggatcaacacgtgccacgacgacgctacgacaagccgctacctccatccgttgatcaaaggtatttctctgcattttgcgctgggttacgagcacccttttcgggatggcaatggtcgcgtggcgcgtgcgttgttttattggtttatgtttaaaagcgattacgcggcattcaggtatatctccatcagtgttctgcttaagaatgccgccgttcagtacggtacgtcttacctctataccgagacagatgaactggatctgacttactttattgactaccagtgctctgtggtccagcgggcggttgatagcttcaagacgtcttacgaagaaagtgttaaggaggctgagtcgttcgagcaatggctctgggagtcagggctatacaaagagttgaacgagaaacagaagactgtatttcaggtcgccaagagtggcaccgcgaagcagttcactgcggtcaatgtgaaggaaaatctgggctgttcctacaacacggcgtcagccgtcctgaacggtcttgttgaattgaacatcttcgtcaagaagaagcagggtcgtgaatgggttttttcaatgcgtgatcaagcagaaatacaaaaaaactggttgaagacttctcgttaatttaacgaatgcccacgtcttcttgaaccgtgggcattacgggtattacagcgccccaaacaccttcttcgccaaactggtagccgccgccgccgggttctcgcgaatggtttcttcctgcttggcaatcatcttgaacaaaccgtccagtgcctgctcggtcacgtagttctcgacgttggcgctcttggcgtccaccgcaccgaaagccgcagccttgccggccagggcattgtactgctgggctacgccgaccttgtcggtagcggccttgacgatgggcaggaacttggcgcggatctgttcacggctgcttttgttcaggtattgggtggcggagtcctggccgccgctgaggatgcctttggcgtcggtcacgctcatgttcttcacggcgttgaccagaatcggctgggcctgggtcacggcggtttcagcagccttgttcatgctggtttccaactgcgtgacctggtcacccatgccgaacatcttcagcttgtcggcgactttacccagcttgcctggcaggccgatcttcacttccgggttgttgctgaaaccaccgggtacacccagttgcttcacggcgatctgcgcgccttgggtcagggcgtccttgaggccgccgctggcgtcgccctgggacaggctgctgaggtccagggccatggcgttggcaccgagcagcaggccggcacacagggcagtcaggcgaagggagttacggagcatggacgcttcctttttatcgaattcagtgggccaccgcgtcaacgcgcagacgcagtggttgaggatcctggccattgagctgcacagcgtgccgctcggtggtgataaacagtagcttgccatccacttcgatgcgagcgctcaccgagtagctgtggccgggtttgacctgggccgggtcgtagctcaggtgaaacggcagcggcacctggcctttgaccgggcctttctgctcggcgagggtcacagccggtgcatctgccagggaaacgtcttgcaggctgacactcaaggtcgcggttggcggcagggcgatgcgttgcaggtagaacacttcgccatcgaggctggccttgggggtggggctcatggactggcaggctccgagcagggcggtaaggcccaggaggatgatctttttcatggtgtcgctccttttcaagggcgccggcatccaaccggcgccttttcaaatctagcggttttcttcaggttcgatgggtatttcggccgcgccatccacacgatgcaatgccacctggcggatcgacaggcgaatctccgccggcaacacgcgcttggccgcgccttctgccagttcgccgagcaggtcgtgatagctcagcttgccggcttcatcgcggcgcagcacatcttgctccagtaaggtctggatgaaatgtcggaaaaggctcttgtcgaagaattccggggcgttgaggccatgcaggatcgacaggcgctgggccatgatcgtgcacaggtcttccagctcttcggcgctgatgctgttctggccgctgttgagcagcagcgaaatcgccatgtagaagcgttgcagggtctgggcgatgctcttggacagcagcgtcagcaacacaaagtgccgcgaactcggcgccgggcgcaggtacacgttgttttcgaaacgcagcaggccttgttcgacaaaggcttccagccactggtcgatcacgctgtcgagttcttccagcgaccagcggataaacagctccgattgcaggtacgggtacagcgcgtgggtgtagcgcaggatctgctcgcggctcatccgcgagctgctctggaagaaactcgccagcagcgccggcagggcgaagatgtgcagcacgttgttacggtagtaggtcatcaggacggcattctgctcgtccaggtacagaatcttgcccagggcatcactctgctccgacagcaggtccatgtccttgacgtgcttgatcagcgccaggccatcgccttcgggcagggtggtgtggggcgagtagggcacacggcgtaacagcgccaggtacaggtccaactggcgcgccatggcttgctcgtccagggccaggcgcgtggtggacagcagcgcgagggcgaccaggttcaccgggttcacggcggcggcttcgttcagatggcgcgccacctgttcgccgaggcggttggtggtttcgttgagccaggctggcttgtagttcggccccagttcctgggagcgccagtccggttgctcgctgtcgaggaattcggccagcttgatcggctcgccaaagttgaccgcgacctggccgaagcgctgtttgagcgcgccgaccaccttgaaaatatcgaagatcgactctttcttcttgctcgcgccacgcagttcgcctagataggtacggccttcgagcacgcgctcatagccgatgtacaccggcacgaacacgatcggcatgcgcgaggagcgcaggaagctgcgcagggtgatcgccagcatcccggtcttcggctgcaacatgcgcccggtgcgcgagcgcccgccttcgacgaagtactccaccgggaagcctttggtgaacagggtgtgcaggtattcgttgaacaccgaggtgtacagcggattgcccttgaaggtgcggcgcatgaaaaacgcaccgccacggcgcagcaggctgccgattaccggcatgttcaggttgatcccggcggcgatgtgcggtggggtcaggccattcttaaacagcaaataggacagcagcaggtaatcgatatggctgcgatggcaaggcacgtagatcacctcgtagccctgggcaaccttctgcacaccttcgatgttattgaccttgatgccgtcgtagatcttgttccagaaccagctcagcaccacttcgagaaagcggatcgcggtgtaggtgtagtccgaggcgatttcgttgccgtagcgcaaggcctgggccttggctttttccgggctgatcttttcccgttcggcctcctcaatgatggcctggcgcaccagcggcatgttgaccaggcccttcaccagattgcgccggtgggacagatcgggaccgatcaccgccgtcttcaggttacgaaagtgcacacgcaggatgcgctgggccatgcgcaccgtgcgttcgtgccctttattgtgctcgatcaattcacgcaggttgataggcgcagagaattgcacgcgggttttgcgacccaggatcaggatgctcaacaggcggcgtagacgcccggtgaccgcccagctgtcggcgaacaacagcttccacgggctggactcgctctcgggggactggccccagaacacgctgaccggaatgatttgtgcattctcttcggcgtgctcgctgagggtatcgaccaagcgggtcagcgtgggcggtgcgccgcgcttgtcctggcgaccgagccagtccggttccggggtgaggtagaagaatgccgccggttccatcagcgggccgaccgaaaccggcagcaccgggcgcggcaggccggccttggtgcactcggcatcgactacggccaattcggtgagggagggtgattgcaggacgtagaacaccggccggctgcggtccaggttgagggttagggacgactggttgatcgtctccgagcgaacccagaggtacaacagtcgacgcaaggtgccaaacactagacggcggaacggggagcgggtcataggcgtgctgcttcaagtggaaaaaaccgagcaggcgctcgggcgagtagtgtgccgtattcgccgaaaatcggcaaaaaagcagcgaagtaaacttgagttgatcgtttttgagcctgtcttatactcggcagttcaatgcgactgactcaacaataaaaaacagtgggagcaaaaacagaatggcaacgcgcgaaactggcaatgtgaagtggttcaacgatgcaaagggctatggcttcattcaacgcgaagacggcaaggatgtgtttgtgcattaccgtgccattcgcggcgaaggccaccgctccctggccgagggccagcaggtggaatacgccgtggtgaccggcgagaaggggttgcaggcggaggatgtggtcggcctttaacgcgcgctgaacccctgttgtggtgagcgggcttgaactgtggtgagcgggcttgccccgcgttgggctgcgaagcggccctaaaaccctacgccgaggagtgcctgacacaacgcggcgttcttattggtgccgcttcgcagcccaacgcggggcaagcccgctcaccacagcaagcgcgctcaccacacaagcccttccctcatgctttcaggatcaggcggttttccaggtgatctgctcttcaccgtccacgctgatgcgaatccaggtatcggcgctttcttcgccttcttcctcgacccaggtccccggtgcacaacgcacttccacgttcagtgcagcaaacgcagcacgggcgcaggcaatgtcgtcgtcccacggcgtctggtcactttccaggtacaggctgttccatttgccgacggctttgggcagccaggtgaccggcacgttgccggccttgcatttgtaggtctggcctttctggacccagtcggtgcacgggccaatggcggcgcccagccaggcggcaatggccttgtggtcgacgtcggcgtccttcaggtaaatctcgatatcgggttggcgcatggatgttcctcgttgcgggattcgaaaatccattcgcggatactggacagtcagttattgaagcacgaaatagtcgtagcgcatcgacacagtgaccaccagcggctcggccgcctcgatcacgtgtgcccggcgctcggcgcttgcacgccagccatggggcgtcatcgccagcaggttggcgcggtcctggggggcggccaggctcagggggaattccagcgtttcgctgtgtgccaggctcatgccgtccggcaccagggccaggtgtttgtcgtcggtgtattcacgcacttcgtcgtacaggcgctcgcgcaattccatcaggtggccgctggtcgggccgaccttcatcaggccgccaccggggctgagcaggcgcttggcctcttcccagtccagtgggctgaacacgctggcgagaaattggcagctacctgacgccaatggcacgcgggccatgctggcgatcaaccaggtcagcgccgggttgcgcttgcacgcacgcttgaccgcttccttggaaatatccagtgcgtagccgtcggcgtggggtagggcttcagcgatctgtgcggtgtagtagccctcgccacagccgatatcgacccagcactgcggcgcgcgttcagcggcgagttcggccaggcgcttggccaccggggcgtagtgcccggcgttgaggaagtcgcggcgcgcttcgaccatggccaggttatcgcccgggtcgcggctgttcttgtgctgcaccggcaacaggttcaggtaaccctggcgcgcgcggtcgaaacgatgcccggccgggcacgccacgccattgtccaccgcgttgagcggggcgttgcatagggggcaggcgagcatcaggcgagcaacttgatcagggtctggtagtagatttcggtcagcacatcgaggtcgctggcgaggatgcgctcgttgacctggtggatcgtcgcgttgaccgggcccagctcaaccacttgggtgccgagggtggcgatgaaccgtccatcggaggtgccgccgctggtggacgcctgggtctcacgcccggtgatcgccttgatgctggcggataccgcatccagcagcgcacccggttcggtgaggaacggcaggcccgacagcgcccactccacgtgccagtccaggccgtgcttgtcgagaatctgtgctacgcgctgctgtagaccttcgacggtggactcggtggagaaacggaagttgaacaccgccgtcaggtcaccggggatcacgttggtcgcgccggtgccggaattgaggttggagatctggaagctggtcggcgggaagaaggtgttgccgtcatcccaatgctcggcggccagttcggccagggccggtgctgccaggtggatcgggtttttcgccaggtgcggataggctacgtggccttgcacgccgcgtacggtcagggtggcgccgagggagccgcgacggccgttcttgaccacgtcgcccaccaacgtggtgctcgatggttcgccgacgatgcaccagtccaggcgttccttgcgtgcagccaggcgttcgatcacagccttggtgccgtggtgcgccgggccttcttcatcgctggtgatcaggaaagccaccgaacccttgtggtccgggtagtcggcgacaaaacgctccgacgccaccagcatggccgccaggctgcctttcatgtctgccgcaccacggccgcaaagcatgccgtgttcatcgatcaacgcgtcgaacgggtcgttctgccacgcctgcatcgggccggtcggtaccacgtcggtgtggccggcaaagcacagtaccgggccatcgtgcttgccatgggtggcccagaagttgtccacgtcttcgatgcgcatcggctcgagcgcaaaaccggcgtcgcccaggcgctgcatcatcagcttctggcaatcggcgtcgatcggcgtcaccgaggggcgacggatcaggtcgatggcaagttgaagtgtcggcgaaaggtcggcatgggccgtcatggggaactccggaagcatgtgatgggcgcaggacgtaaggggcgcagattcagtgtgggagggggcaagtcgaatcgtcgcaccgcccctcccacacaaagcattggcctgggccaagactcataaaacggccgttatcttatagcaaaacggcggccagaggccgccgtttagtgcattgcgcgagtttttacgcagccggtgcgggttccgctgccgccgccggtttcggcagcgaagacaggaacgccatgaccagcgccgccacatacggcagcgactgcaccagcaacatcaccacccagaagcggatgtcattgctcggcaggccctgcaccaggtagatccccagcgccgcgccccacaacagcagcatgatgaacatctcttcgcgggcttcggaaatcgccacccagaagccgtggttatcggcgtttttcggtgtacggaagaacgggatgctggtggtgaagaagccatacagcaccgccttggcgatggtgtgggacaacgccagaccggccagggccgcgcagaatgcgtccttcaagttcacgcccaccgcacgccggtacaggaaaatgatcttgcccaccttgaacacgaacagcgccaacggcgggatcgcaaaaatcagcagcggcggatcgacccgcgttggcacgatgatcattgccgccgaccacagcagcgcgcccacggtgaagaagatgttcatgccgtccgctacccacggcagccagcccgcaaggaagtggtagcgctggccacgggtcagctcggtgtccttgccgcgcaacaggctcgcggtgtggcgcttgatgatctggatcgcgccgtaggcccagcggaaacgctgtttcttgaagtcgataaaggtatccggcatcaagcccttgccgtagctgtcgtggtaatacgccgccgacaggcctttctcgaacacccgcaggcccagttcggcgtcttcgcagatgcaccagtcggcccagcccagttcttcgagcaccgagcgacgggtcatggtcatggtgccatgctggatgatcgcgtcacggtcgttgcgggtgaccatgccgatgtggaagaagcctttgtattccgcgtagcagagcttcttgaaggtgctttcgttctggtcgcggtagtcctgcggcgactgcaccacggcgattttcgggtcggcgaagtgcggcaccatgtgcttgagccaattcggcgagacgcagtaatcggagtcgatcaccgcgatcacttcggcatcctcggcggtgtgcgggatcaggtagttcagtgcgccacccttgaaaccggccaggggcgcgacatggaagaacttgaagcgcggtcccagggtttcgcagtaatcgcgcaccggctcccacacggccgggtccttggtgttgttgtcgatgatcaggacttcgtagtccgggtaatcaagggcggccagggcgtcgagggtctgtttgaccatctccggcggctcgttgtagcacggcacatggatcgacactttcgggcggtagtccgaatcccccaccactggcaggaattcgcgccggcgcttgtgggtccagaccgcttccgccagttcatgggcttcggtcagcaacacgataaacacgcccagggcaccgagggccaggagaatgcccacggtgacactgaaccaggtgctgtattgctggctgtagtcgtagccgatccacaccagcaccgaaccgcacaggaatgcgataaaggtcaggaaggtgcggccgcgctggcgcagggccgagccgtcgatcatcagcagggtcagcgacaacagcgcgagcaccaccgaaccgatggccagcacgcgccactgcgggatcgcgaccacggggccttcaaagttgaatttctgctggcgtgcggcgttgtacacgccccagtaggcgcccgccgagccttcgtcgctgactttccacggctgatcgaaggcctcgatcacgaagtagttgtagccctggcggttcagcttgttcaccagcgtgcgcaggtaaatcgcctggtcggccggggaggtttcgttacccccgcgcatgcgtccgttactcggccagcccacttccgacagcagcagcggctttttcgggaacagtttcttcaggtcacgggcacggtcgagtacgtattggccggccttgtccatcgggatgtattcccagaatggcaggatgtgcgcagcaatcaggtcgacgtgcttggccagttgcgggttcttttcccagatgtgccactgttcggaggtcgtcaccggtactttcacagcggcgcgcacccggtccagcagcacaatcagcgcctcaggggtgatttcttcccggaacagcgcttcgttacccaccactacccgcaccacactgcgcgagctgttggcgatttcgatggcgcgctggatttcccgctcgttgcgttccaggtccgggctgatccagatccccagcgtcacgcgcaggccgaactcttccgccagcttggggatgtcccccagggtgccgtcgaccgagtaggtgcggatgttgtccgtcagcttgctcatgattgcaaggtcttgacgcatctggtcgtcggttgggtactggtctttctgtgggaactggccttgttggaacggcgagtaggaaaaaccggagatctgttcaggccagttgggggtggtgacggggcggttgatcagcgcccagaagccggtgaacagcgcggcgattgccagcacgatcaccaggttgagtccaaatttacgcgatgccatggctatttcgggttccaaaaggtgtggaacgaaaagaggtgtcggcctgcgccgaacggcgcgcatcctacaccggcgcttccctgaccgtacagcaagcagagaaaaaccggacattagtcagcgaaaggccatcttagttcttaacttgtagcttgaggcttcgaacttgtcgctgcgtagccctataatgcgcgccggtttttggggtaatggtcatgagtacagaagatccgcggtttgcaggcgtcgcccgcttgtatggcattgaaggcctggaacgcttgaaagcggcccatgtggcgatcgtcggcgtcggcggtgtgggctcgtgggcggcggaagccgtggcccgttgcggggtgggcgagatttcgctgtttgacctggatgacgtctgcgtcagcaacagcaaccgccagttgcatgccctggacagcaccgtaggcaaacccaaggtcgaggtgatggccgagcgcctgcgcggcatcaacccggactgcacggtgcatgcggtggccgacttcgtgacccgcgacaccatggccgaatacatcacccccaacatcgattgcgtgatcgactgcatcgacgcggttaacgccaaagctgcgctgatcgcctggtgcaaacgccgcaagatccagatcatcaccaccggcggcgccggcgggcagatcgacccgacattgatccaggtgtgcgacttgaaccgcaccttcaacgacccgttggcgtcgaaagtgcgctcgaccctgcgccgtgactacggtttctcgcgtaccgtgacccgccattacagcgtgccgtgcgtgttttccaccgagcaactgcgttaccccaagccggatggcagcatttgtttgcagaaaagttttgtcggggatggcgtgaagctggactgcgcgggtgggtttggcgcggtgatgatggtgaccgccacgttcggcatggtggcggcgaccaaggcggtggacaagattgtggccggggtgcgtaggccgtcggagcgggtcaagcccacttaaatctaggaacccgacataattcaaatgtgggagggggcttgcccccgatagcggtggatcagccaacttgttcagtgactgacaccctgcaatcgggggcaagccccctcccacatttagctttgtttatgactgatttcgcgcatacgttgcagcaccgcgttgaggccattgctgcgcgacggtgacagttgacgggaaagccccaattgattgaaccagtcgggcaagtccacggccagcagctcggcagcagaaagcccattgacccgcgccagcagcagcgccaccaacccacgaatcatccgtgcatcgctgctggcggcgaactgccagtggccgtcctgcaaacgccccaccaaccacaccaggctttcacagccctgtaccaggttggcgtcgactttgtcctcggcggccagggcaggcagccgttcgccccactgcatcagcatccgcgcgcgttgttcccaactgccgacggactgaaaggcttccagcgcagcaaccgcctccattggcaggctcatcgcagcatatccagcgcctggtccagcgcttcaaagaagcgttccagatcatccgaatcgttgtacagcgctagagacacacggatcgcccctgacaactccattgccttgagcagcggcattgcgcaatggtgtcctgcgcgtacggcaatgccttgctcggtgagcaagtgcgcaagatcagcgttatgcacgccatcgacaacgaagctgaccaacgccacctgcggcgcgcccagtatgtgcacgccattgcgcgctttgagcccacgcaacaggtagtcatgcagcgccgcttcatgggcgacgaccgcttgttggtccagcgaattcaggtaatccaggctggcacccaggccgatcacactggcaatcggcggggtgcctgcttcgaaacccagcggcgccgggcggaaactggcgctgtggtagtcggcctgttgcaccatctcgccgccaaactgccagtgtcgcaagtggtgcagggctgcgttgcggccaaacagcacgccgacgccatccgggccatagagcttgtggctggaaaacacatagaagtcgcaacccagggcctgcacgtcgtggcggccgtggacgatgccttgggcgccatcgaccacggtcagtgcgccgtgggccttggccgcagtgatcagcgcttccagaggctgccaggcgccgagcacgttggataactggctcaccgccagcaggcgtgcgcgcgggccgatcagcgcggcggcggcttgcaggtcgatcacgccgtcatcattcaacggcagcaccaccagcgtggcggcgcggcgtttggccagttgctgccagggcagcaggttggcgtggtgttccagggcgctgacgacaatctcgtcgcccgcattgaataagtgctcaaggccgtaggccaagaggttcagcgcagaggtcgcgccgtgggtgaacacgatctgcccactgtcgcctgcattcaaccactgcgcgaccttgctgcggctgtcttcgaacgcctgggtcgcatgggcgccgggcaagtgctgggcacggtgcacattggctgcgccattggcgtagtaatggctgatcgcatccaacagggcctggggcttttgtgtggtggcggcgttgtccaggtacgtctggtcttgccgttgcagggtggcgatggccgggaaatcggcgcgccagggggagggcactagcatggtgttcaagactcgtataagcgagccccagggtcggggcccgctagtggcatcgagtggctgcttagttgtgagcgtgcagcgcttcgttcagttcgatggccgatttgtgggttttgcactccacggcaccggtctcggagttgcgacggaacaacaggtccggctggccagccagttcgcgagccttgaccactttgaccagttggtttttctcgtccagcagcgcgaccttggtgccggcggtgacgtacaggccggactccacggtgttgcggtcgcccaacgggataccgataccggcgttggcgccgatcaggcagccttcgccgaccttgatcacaatattgccgccacccgacagggtgcccatggtggagcagccgccacccaggtccgagcccttgccgacgaacacgccggccgatacacggccttcgatcatgcccgggccttcggtaccggcgttgaagttgacgaaaccttcgtgcatcacggtggtgccttcgcccacataagcacccaggcgcagacgcgcggcatcagcgatacgcacgccgctcggcactacgtagtcggtcattttcgggaacttgtccaccgagaacacttccagcagctcgccacgcaggcgcgcttcgagctggcgttcggccagttcgttgatgtcgatcgcgccctggctggtccaggccacgttcggcaactgcgggaacacaccggccaggctcaggccgtggggcttgaccaggcggtgggacaacaggtgcagcttgaggtaggcctcaggcgtggaggtcagtgcggcgtcttcggccagcagggtggcaaccagcggggtgtggctttcagccaggcggttgagcagcgcggcttgggtggcgtcgacattcttgagggcatcggccagttgcagcgcttggctgatggtgaaggtgatggcctggttgccttcggtgtaaccgaggatcggcgcgatggccgcgacgatttcagccgatgggttgagcagcggttgcgcgtaaaacacttccagccaagcaccttggcggttctgagtgccgacgccgaagcccaggctgaacagggaattggacatgctgttacctctacaaaaatggaaagggctggcctacttgagggccgccgaataactatctggcttgaagccaatcagggttctgtcaccgagatcaagcaccgggcgcttgatcatcgaaggttgtgcgagcatcaattcaatggctttcgactgatcgagatcggctttgcgttcgtcttcgagtttgcgaaaggtggtgcccgcacggttcaaaaccacctgccaaccgtgctcgttgcaccattgggtcaagtgttcgcggtcgataccggccgttttgtagtcgtggaactcatagcccacgccgtgctcatcgagccaggtgcgcgcttttttcatggtgtcgcaggctttgatgccgaaaaggtgcaacgttttgcttgaagcggtcaaggaattgcccccctttggaccaagtagaaattaaaggtcacggattatgccacgaccagcgggaccgtgcccctcgtcatgctggcgtgcgacttatgtgcaaaggccggtcggcagcataggcggttaacatagccgggcaatatggcacttcaacggccagttgttgcctgatgtgtgtcgttgcaagtcgattgtccgggaaacccgcgttatgcaaaccgcctataccgttcttatcctgctgatgctggtcagcgtttcgcgtctggttgggcgtgtcattcctctgccgttgcccctggtgcagatcgccgccggtgccctgctggcctggccgacgctgggcctgcacgtggcgctggacccggagttgttcctgtttctgttcctgccgccgctgctgttttcggatggctggcgcatgcccaagcgtgagttgtggcggttgcgtgggccgatcctgacgttggcggtggggttggtgttgttcacggtggtcggtgctggttatttcattcactggatattgcctacgatcccgctgccggtggccttcgccttggcagccgttttgtcgccgacggatgccgtggcggtgtcggcgatttcccagaaccgtctgcctacgcccttgatgcatatgctgcagggcgaggccctgatgaacgatgcgtcgggcctggtgacgttcaagtttgccctggcggcggcgttgaccggggtgttttccctggcggatgccagcctgacctttgtgttggtcgctgtcggtggcttggctgttggcgtagccctgagctggctggtcggccgactgcgcgcctggatgatcgcccgtggctgggatgacccggcaacccacgtggtgttcatgttgttgctgccatttgccgcctacgtgctggcggagcgcctgggcgcctcgggcatcttgtcggcggtcgccgcgggcatgatgcaaagctggcttgacctgctgccacgccagaccagcacacgcttgctcaatcgcagtgtctggtcgctgttggagtttgccttcaacggcctgatcttcctgctgctgggcctgcaactgccggacatcatcaaggccgtggtcagccacgagacaacgctatggccgaccctgttttatcgctgcctggatgtgatcgcgatcttcctggtgttggtggtgctgcgttttatctgggtgcagagcatctggcggctgtcaggcctgttacgccgaattcgtgggaaaagcgagctgacgctggtgccgaccgcccgttcctgctggttgttgactgtgggtggtgtgcgcggtgcggtgacgttggccggtgtcatgtcggtgcctttgctgctggcgccgggccaggactttcccgagcgcgacctgctgatcttcatcgcggcaggcgtgatcctcctgtcgctgatcgctgcctgtatcgccttgccgttgttgttacgtggcattgaaaagagcccggacgagaaacgtcacaaagaggtccgcgaggcctggaaaaaaacggctgtggctgcgatccatgcgctggaagcagaagaacccgctgagcccgaaagccaggacgccgcccaggcggcacttgccactgagctcaaggcacggctgatgtcggaatatcgccatcaattggaggtgttcaacgactcggccgaggcccaggtgctggcgcagcagatggacctgcttgagcgcaaactgcggctcaaggcgctgcgggcgcagcgcctggagttatatagcctgagtcgtcatcaccagattggtgatgacgtgttgagggaggtgttggcggatctggacatgagtgaggcgaatctggggcaggtgaaatgaccaccaagccctttagcggcgacgctgaataaaatcgcgaatgcgttcagccgcttccacacattccgccagcggtgcaaccaacgccatgcgcacgcgcccggcaccggggttgaaaccatccacttcccgcgacagatacgagcccggcaccacggttacatgttcttccacgaacaagtcgcggcagaacgcggcgtcgtcgccattcacattcggccacaggtagaagccgccgtccgggctctgcacatccagcactggcttgagaatcgccagcaccgcgtcgaatttctcgcgatacaggtcacggttggccagcacgtgggcttcatcctgccaggcggcaatgcttgccaactgggtctgcaccggcatcgcgcagccgtggtaggtgcggtacagcaggaacgccttgaggatgtcagcgtcgccggccacaaagcctgagcgcaggcccggaaggttggagcgcttggacaggctgtggaacaccacacaacgcttgaagtcctgacgccccagttcgacgcaggcgctcagcaggcccggcggcggggtttgttcgtcgaagtacagctcgctgtagcactcgtcggcggcgatgacgaagtcatattcgtcggccagggcgatgagttttttcagcgtttcgaccgggatcagcgcgccggtcgggttgccgggggagcacaggaacaggatctggcaacgcttccagatgtccggggtcacggcgtcgaagtccgggttgaagccattggcgtccaggcatggcaggtagtgcggcttggccccggccaggaacgcggcgccttcgtagatctggtagaacgggttcgggctcaccaccagcgcgtcgtcgccacggttgaccacggtctgggtgaaggcgaacagcgcttcacgggtgccattgaccggcaggatattgcgcgccgggtcgagccagcccttgggtacgttgaaacggcgttcgcaccaggcgccgatggcctcacgcagcgccgggatgcccagggtggtcgggtagaccgccatctggtcgagattatcggccagggccttggccacgaattccggggatttgtgcttgggttcgccgatggacagcgcaatcgggcgcttgtccgggtttggcgtgacgctgccgagcagggcgcgcagtttctcgaacgggtagggctgtagctggttcagggcgttgttcatggaaatctcgttcaattcggttgaaagcatgcggtctgctgggcgcagcgattcttatgtgggagggggcttgcccccgattgctgactgtcagttgaaatattcgtagctgacccaccgctatcgggggcaagccccctcccacacaagccctgcttcacagattaatccgcgtattcaaatagtcaggcgcgtgagttcgacgccgggctcctgggtcacgctcaactgctggacgatggcttcctgcaaacgcaggcacagctcagggtcggacagcggctgattgtcggcatcggtaatgaagaacacgtcctccacccgctcgccgagggtcgcaatcttggcgttctgcaacgacaggtcgaactccaggaagatcccgccgatgcgtgccagcaggcctgggcgatccggagcgctgagttccagtactgtgaccggccgttgggcgtcgttggaaatggtgacctggggtgcaaacgcaaagtgcttgagctggcgcggcacccggcgctggatgatggtcgggtagtcgtcagggttacgcagggcctcggtcaggccttcgcggatcttcttcacgcgcgccgggttgtcgccaatcgagtcgccatcggtgtcgagcacgatataggtgtcgagggtgaactggctgctggaggtgatcacccgggcgtcatggatgttcaggttgagctggtccatggcggccacggttacggcgaagaagtcgtgctggtccggcgcgtagatgaagatctgcgtgccgccttcgaattcgcgttgggtggtttccttgatcagcaccaacgggccgccatcggccggttgctgcaggatcgcgtcggtatgccaggccacatcaccggcggtgtgacgcaggaagtaatcgtcgcccagttgcgaccacagttgctcgacatcgtccgggtcgttgccgccgcgcaccaggatatccagggctgcgctctgtgtgcgccgaatctgctcttcgcggtccaccgggttttccaggccacggcgcagggcacgcttggtctcggtgtacagctggcgcagcaggctggcgcgccacgagttccacagcgtcgggttggtcgcgttgatatccgagacggtcagcacgtacaggtagtcgagacgggtttcatcaccgacgatctgtgcgaagtcgtggatcacctgcgggtcggacaagtccttgcgctgggcggtcgtcgacatcaccaggtggttctgcaccagccagacgatcaggcggctgtcccacagtggcaactggtggcgctggcagaaggcttcggcatcaaccgcaccgacctcggagtggtcgccgtgcctgcccttgccgatgtcgtggtaaagaccggccaggtagatcaactcgggcttgggcagcttggccatcaatttactggccagcggaaatttctccgacacctgggtgtactgcaacttacgcaggtgcttgatcaggttcagggtgtgggcgtccacggtatagatgtggaacaagtcgtgctgcatctgcccgacgataaaaccgaattccggcaggtagcgcccgaggatgccgtaacggttcatgcgccgcaggttgcggtggatgccgatcttgcacttgaacagctcgatgaacaggctggtgttgcggatatcgttgcggaagtcgtcgtcgatcaggtgccggttttcccgcagcaggcgaatggtgtcggcgcgcacgcctttgatttccggctgttgggccatcagcacgaagatttccagcatggcgaacggcgtgcgacggaacacgttgtcgttgcgcgcctcgatatagccgtcgtgcagttggaagcgtgcattgatcggttgtggcggcgcttcgtcttcaggggccaggatcacttcttcgaaatgctggatgatcaggtcgctgagctgggcaatgctcatgaccacacggtaatactgctgcatgaagctttcgatgctggtcttcgcgtcttcgccttcaaaacccagcagggtggcgatggagcgctggtggtcgaacagcaggcggtcttcggaacgcccggccagcatgtgcagggcgtagcgcaccttccagaggaattcctgggatgaagccagcagggcgttttcgctttctaccaggaagccttcgccggccagggcgcgcaggttcagggtgccgtactggcgacgcgcaacccacagaatcgtctggatatcccgcagcccgcccggcgagcctttgacgttgggttccaggttgtattcggtgtcgttgtacttgtggtgccgggccttttgctcggcgcgcttggccaggaagaagtccttgctcggccacatgtgtgcggtgctggtgacttcgagcatgcgctggcgcaggcgctcggggccggcgatggtgcggctttccatcaggttggtgatcacggtgaggtcggcgcgcgcctcttcggcgcattcgtccaccgagcgcacgctttggccgacttccagtccgatgtcccacaacagcgtcagaaaacgctcgatggaatcgcgaaagatctcatggtcggcgctgtccagcaggatcagcaggtcgatatcggagtagggatgcagctcgccgcgcccgtagccgccgacagccaccagggcgatgtctgcgtcttcgctccaactgaactgttcccaggccttttgcagaatgttatcgacaaaccaggcccggtcctcgatcagccggcggatgtcccgaccactgcgaaagcgcgcgtcgagtacctcgcgggcctggcggatagccttcttgaacgcggcgatggggctcgccttcagggccagttcggcctggaactggccacggtcgaagagttcgggatccacctggggcatcgatcggctttcctttctatctattcagtcagtcacaacacagtgggggaaaaccaaagcaacctttaggccgaaacgcgtgggatcgtgtcgtcagcgcgcagggtaaagatctcgtagccggtttcggtgaccagcaaggtgtgttcccactgggccgagagcttgcggtccttggtgatggcggtccagccgtcgcccagtaccttggtgtcggccttgccctggttgatcattggttcgatggtgaaggtcatgcctgccttcagttccataccggtgccggcgcggccgtagtgcaggatctgcggctcttcgtggaagacggtgccgataccgtggccgcagaattcgcgtaccaccgagaagccgttcttttcagcgtgcttctggatcacttcgccgatgtcgcccaggcggcagccgggcttgacgatctcgatggccttgtacatgcattcctgggtgacctgggacaggcgctcggcccagaccggtacgttaccgacgtggaacatacggctggtatcgccaaagtagcggtctttgatcacggtgacatcgatgttcaaggtgtcgccatccttcaacggcttgtcgcccggaatgccgtggcagaccacgtggttgaccgaggtgcagatcgacttggggaagcccttgtagttcagcggcgcagggatggcgccctgcacgttgacgatatagtcgtggcagatctggttgagggtctcggtggtgacgccgggcttgacgtgttcggcaatcatttccagcacgtcggcagccagtttgccggcgatgcgcatgccagcgatgtcttcggcggttttcaagctaacggtcatacaggctctctctagcgcgacgcgctgaaatcaatacggtttacgggcgtgcgacaaaaggttgcagaattcgcacaagccacagaaaacgcgattctaacagaccatggcgtcaaatcatgagcctctgatgatcgcttctgtctataaggtagggctatgtcggctctattcaaggggttacacgaaggcgcgctacggcaaatgtgattgcgtgttccgtttttgccgatgctgtggtataaaatgcgccgctttccggggataccccgcaaagcttaaatccacacacgtgtcgacacgatgacctgggtgccggaggccttgatgccgctggttggtcattgggatacgtggaggccaaacccgacttattaaggaactatcatgtcccaagtcaacatgcgcgatatgctgaaggccggtgtgcacttcggtcaccagacccgttactggaacccgaaaatgggtaagtacattttcggcgcgcgtaacaagatccacatcatcaaccttgaaaaaaccctgccaatgttcaacgaagcgctgactttcgtagagcgcctggcccagggcaaaaacaagattctgttcgtcggcaccaagcgttccgctggcaagatcgttgctgaagaagcagcacgttgcggttcgccgtacgtcgatcaccgctggttgggcggcatgctgaccaacttcaaaaccatccgtgcttccatcaagcgtctgcgtgaccttgaagtgcaagccgaagacggtactttcgccaagctgaccaagaaagaagcgctgatgcgctcccgtgacctggaaaagctcgatcgttccctgggtggtatcaaggacatgggcggtctgcctgacgcactgttcgttatcgacgttgatcacgagcgcatcgcgatcaccgaagccaacaagctgggcatccctgttatcggcgtagtcgataccaacagcagcccggaaggcgttgactacatcatcccaggcaacgatgacgcaatccgcgctatccagctgtacatgggttcgatggctgacgctgtgatccgtggtcgcaaccacgttgctggcggtaccgagcagttcgttgaagaagctccggtagctgccgctgagtaattagcgccctggcgttgactcagtaagcaaaaagggggcttggccccctttttgccacctcgaaaaccatttgtcggcagcgcagctacatcatctgtaacgtgcagcggcctacaagggagattcgggaagaattgatcgcccgtttgatcgggtggaatggttgaaaacctatccaagaggattttgaaatggcagagattactgcagcgttggttaaagaactgcgtgagcgtaccggcgaaggcatgatggattgcaaaaaggccttgaccaaggccggcggcgacatcgaaaaagccatcgacgacatgcgtgcctccggcgccatcaaggccgccaagaaagctggcaacgtcgctgctgaaggcgctatcgctctggttgaagacggtaaagccgccgttctgctggaagtgaactcgcagaccgacttcctggccctgcaagatgacttcaaggcattcgttgctgccagcgtcaagaaagcattcgatgagaagctgactaccgttgagcctctgatcgaagcccaagaagctgatcgcctggttctggttggcaaggttggcgaaaacgtcaacatccgtcgcctgactcgcgttgaaggtgatgtggttggtggttacctgcacggcaacaagatcggtgtagctgttgttctgaaaggcggcgacgttgagctggccaaagacatcgctatgcacgttgctgccagcaaccctgagttcctgctgccttcggaagtgtctgccgaagcgatcgagcgtgaaaaagctgtgttcctgagcctgaacgccgacaagatcgccggcaagccagagaacatcgttgaaaacatgatcaaaggccgtatcagcaagttcctggctgaagcgagcctggttgagcaggcgttcgtcaagaaccctgaaatcaaggttggcgaactggccaagaaagccggtgctgaaatcgtttccttcacctactacaaagtaggcgaaggcatcgagaagccggtcgacaacttcgctgaagaagttgctgcccagctggctgccgccaagcaataagacagttttcaactgtcgcccgaaagaggctgcccgctcacgcgcgcagcctcttttcaaatgggaaggctgattttaattggcttcctttcggaactggcttacaaagccgtgttccgatggcgctgtgacagcgtccagctagagtgaacgcaagccgtaaacggctcgccaagaatttttaaaatacgccgcaggagagattcgcaatggctcagcagggcagtggttatcaggctcgctataaacgcattctactcaagcttagcggcgaggccctgatgggctcggaagagttcgggatcgatcccaaggtgcttgaccgcatggcgctggaagtcggccagttggtcggcatcggcgtgcaggttggcctggtgatcggtggtggcaacctgttccgcggcgcggcactgagtgctgcaggcatggatcgggtcaccggcgaccacatgggcatgctggccactgtgatgaacgccctggccatgcgcgacgccctggagcgtgccaatatctcggctatcgtgatgtcggctatttccatggtcggcgtgaccgatcactatgatcgccgcaaagccatgcgccacctgaactccaaggaagtggtgatcttcgcggccggcacgggtaacccgttctttaccaccgattcggcagcctgcctgcgcgccatcgagatcgatgcggacgtggtgctcaaggcgaccaaggtggatggcgtgtacaccgcagacccgttcaaagacccgcatgccgagaagttcgatcatctgacctacgatgaagtgctggatcgcaagctgggcgtgatggacctgacggctatttgcctgtgccgcgaccacaagatgccactgcgcgtatttaacatgaacaagcccggcgccctgctgaatatcgtacacggcggcgcagaagggactctgatcgaggaaggccaacaatgatcaacgaaatcaagaaagacgcccaagcgcgtatgcagaaatccctggagtctctgagccatgcattcggccagattcgtaccggcaaggcgcacccgagcatcctgggcagcgtgatggtgccttactacggctctgatacgcctatcagcagcgttgccaacattaccgttaaagactcgcgcaccctgcaagtcgtagcctttgagcgcaacatgctgggtgctgtcgacaaggccatccagagcgccggtttgaacctcaacccgaccaacctgggtgagttgctgctgatctccatgccggccttgactgaagagacccgcaagggcttcaccaagcaggctcgcagcgctgcagaagacgcgcgtgttgctgtacgtaatatccgtcgcgatgccttgggtgacctgaagaagctggtcaaggacaaggaaatcagtgaagacgaagagcgtcgtgccaccgccgatatcgacaagttgaccaaggatgccgaggcccagatcaccaaggccacggaagaaaaagaaaaggacctgatggccgtataaggggtcaggacgccttcatggaaaagaccaagcagactgtgccctccgtggtgccgcgccatgtcgcgatcatcatggatgggaataatcgctgggcgaagaagcgctttatgccgggtgtcgccgggcataaagcgggtgtcgatgcggtaagggctgtgatcgaggtgtgtgccgaggccaaggtcgaagtgttgaccctgtttgcgttctccagtgagaactggcagcggcccgccgaagaagtcagtgccttgatggatctgttcttcaaggccctgcgtcgtgaggccaagcgccttaacgacaacaacatcagcttgcgcatcattggcgaccgctcgcgtttccacccggaacttcaagctgccatgcgtgaggctgaggcgatcacggctggcgccaaccgttttgtgctacagatcgcagccaactacggcggccagtgggatatcgcccaggcagcgcagcggctggctcgtgaagtgcaggccggccatctgcgcccagacgacatcacgcctgaactgttgcaaacctgcctggtgaccggtgacctgccgttgccggacctgtgcatccgcaccggtggtgagcaccgcatcagtaatttcctgctgtggcagctggcctataccgagctgtacttctccgacctgttctggccggacttcaaacacgatgccatgcgtaatgcactggccgatttcgcttcccgtcagcgtcgcttcggtaaaacgagcgagcagatcgaagctggagcccgggtttaaatgcttaaacaacgaatcatcacggcactgatcctgttgccgattgccctgtgcgggtttttcctgctcgacggctccggctttgcgctgtttatcggcctggttgtcaccctgggtgcctgggaatgggcgcgcctggcggggttcagtgcgcagctcccacgcgtggtgtatgccgctgtcgtggctgccttggcgtttctcttgtacatcctgccggacctcgcgccctgggtgttgggggcggcagtgttgtggtgggcgctggcgacgttcctggtactgacctatccgcgcaccagcggtcaatggaccagtgttgcctgcaagctggtgattggcttgctgatcctgctgccggcttggcaagggctggtggagatcaagcgttatccaatgggtaactggttgatcctggcagtcatggtgctggtgtggggggctgatattggtgcctacttctccggtcgggctttcggcaagcgcaagttggcgccggcggtcagtccgggcaagagctgggaaggtgtctatggtggtttggcgttgacgctgatgatcgcgctggtcgtcggtgtggtgcgcggttgggcggcgaaggaaatcttcctggcgctgctggccacggccattgtcgtgcttgtttcggtggtgggcgacctcactgaaagcatgttcaagcgtcaggcgggtatcaaggacagcagtaacctgctgcccggtcacggtggtgtattggatcgtatcgacagcctgacggcggccatcccgatcttcgcagtgctgctatggatgactgcttcgtgagccgccttcaacaagtgaccgtgctgggtgcaaccggctcggttgggctgagcaccctggatgtaattgcgcgtcatcctgatcgctatcaggtctttgcccttactgggtttagccgcctgagcgagctgttggccttgtgcgtgcgccacgcaccgcgcttcgtcgtagtgcctgaggcaggagcggcgcgtggcttgcaggatgatctgcgggctgctgggctggcgactcgagtgttggtgggcgaggaggggttgtgtcaggtctcggctgacgccgaggtggataccgtggtcgccgctatcgtcggtgccgccggcctgcgtccaaccctcgccgctgtagatgccggcaagaagatcctgctggccaacaaagaagcgctggtcatgtctggcgcgctcttcatgcaggcggtgcgcaaaagcggcgccgtgctgctgccgctcgacagcgagcacaacgcgatcttccaatgcatgcccggcgactatgcgcgtggcttgagccaggttggcgtgcgtcggatcctgctgaccgcctccggtggtccgttccggcaaactcctctggccgagcttgagcatgtttcgcccgaccaggcgtgcgctcatccgaactggtccatggggcgtaagatctcggtggattcggcgagcatgatgaacaagggcctggagctgatcgaggcgtgctggttgttcgatgcacggccggatcaggtcgaagtggtgattcacccgcaaagtgtgatccattccctggtcgactatgtagacggttcggtcctggcccagttgggcaaccccgatatgcgcacgccgatcgccaatgccttggcctggccggagcggattgattccggtgtcgccccgctggatctgtttgcagtggcccgcctggacttcgaggcgccggatgagcagcgctttccttgcctgcgcctggcccggcaagcggccgaagcgggtaacagtgcgccggcaatgctgaatgcggccaacgaagtggctgtggcggcgtttctcgaacggcgcatccgctttccgcagatcgcgagtatcatcgaggacgtcctggcgcttgagcctgtcgtggcggtgaatgacctggcggcggtattcgaagccgataccaaggctcgcgccctggcagagcaatggttgagctgcaacgcgcgttagtctgtgggcgggttcgagccttcaggcactggattggaatgcggagaaattagatgagtgcgctttacatgattgtcggcaccctggttgctctgggtgtgctggttaccttccacgaattcggtcacttctgggtggcacgtcgttgcggcgtcaaggtattgcgcttttccgtcggcttcggcatgccgctgttgcgctggcacgaccgccgtggcacggagttcgtgatcgcggccatcccattgggtggctacgtcaagatgctcgatgagcgtgaaggcgaggtgccggcagaccagttggatcaatccttcaatcgcaagaccgttcgtcagcgtatcgccattgttgctgcaggtccgatcgccaacttcctgttggcgatggtgttcttctgggtattggccatgctgggcagccagcaggtgcggccggtgatcggtgcagttgaggcggacagcattgccgccaaggcagggctggttgctggacaagaaattgtttccattgatggcgaacccaccacaggttggggtgcagtcaatttgcagttggtgcgtcgcctgggtgaaagcggcaccgtgaatgtagtggtgcgcgagcaggactccacggccgagagcccgcgtgagctggctctcgaccactggctcaagggcgctgatgagcctgatccgatcaaatccctgggcatacgtccatggcgtccggccttgccgccggtgcttgccgagctggatccgaaaggtccggcccaggctgcgggcctgaaaaccggcgatcgcctgctggctctcgatggtcagccactgggtgactggcaacaggtggtcgatctggttcgtgtacgccctgataccaaaattgtgctgaaagttgaacgcgacggtgctcaaatcgacgtccctgtgaccttgtcggttcgcggggaagccaaggcggccgggggttacctgggcgccggagtcaaaggtgtcgattggccgccatcgatggtacgtgaggtgagtttcgggccgttggcggcaattggcgagggtgcgaaacgcacctggaccatgagtgtactgacgctcgaatccctcaagaaaatgttgttcggcgagctctcggtaaaaaacttgagtggaccgataaccattgctaaagtggcgggcgcttctgcccagtcgggtgtcgcggatttcctgaatttcctggcttatctgagtattagcctgggggttctgaatttgctgcccattccagtattggatggggggcatctgttgttttatctggtcgagtgggtgcgtggtcgccccttgtcggatcgggtgcagggttgggggatacagatcggtatcagtttggtggtcggggtgatgttgttagccctggtcaacgatctgggtcgactgtaacgcttcgctgaattgcgaatctgccgcattttgcggcagtttgtttattgccagttggaataagaaaggacttcatgaaacgtctgctgctaactgcggttctcaccgtattgatgatcgccgaagttcacgccgagtccttcaccatctccgatattcgcgtcaacggcctccagcgggtttccgcgggtagcgtctttggtgccttgccgttgaacgttggggaacaggctgatgaccgtcgcctggtggaatccactcgtgcgctgttcaaaaccggtttctttcaagacatccaactgggtcgcgaaggcaacgtcctggtcatcactgtggtcgagcgaccttccgtcgccagtatcgagatcgaaggcaacaaggcgatctcgactgaagacttgatgaagggtctgaagcaatccggcctggccgaaggcgagatcttccaacgcgccaccctcgaaggtgtgcgtaacgagctgcaacgccagtacgttgcccagggccgctactccgcgaccgtggaaacggaagtggtgccgcagccgcgcaaccgtgtcggcctcaaggtcaacatcaacgaaggcactgtggcggcgatccagcacatcaacgtggtaggcaataccaagttctctgatgacgacctgatcgacctgttcgaactcaagaccaccaactggctgtcgttcttcaagaacgatgacaagtacgcccgtgaaaaactgtccggtgacctggaacgtctgcgttcctactacctggaccgtggctatatcaatatggatatcgcttcgacccaggtgtccatcaccccggacaagaagcacgtctacatcaccgtcaacgtcaacgaaggcgagaagtacaaggttcgcgacgtcaagctgagcggcgacctgaaagtgcctgaagaccaggtcaaggcgctgttgctggtgcagaaagaccaggtgttctcgcgcaagctgatgaccaccacgtccgaactgatcacccgtcgcctgggcaacgaaggctacaccttcgccaacgtcaacggtgtgccgacgccccatgatgatgaccacaccgtggacatcaccttcgtggtcgatccaggcaagcgtgcctacgtgaaccgtatcaacttccgtggcaacaccaagtctgcggacgaagtgctgcgtcgtgaaatgcgtcagatggaaggcggctgggcctcgacttacctgatcgaccagtccaagacccgtcttgagcgcctcggcttcttcaaggaagtcaacgtcgaaaccccggccgtaccgggtgtggatgaccaggttgacgtgaactacgccgtggaagaacaagcatcgggttccatcaccgccagcgtcggtttcgcacagagcgccggcctgatcctcggcggttcgatcacccagaacaacttcctgggtactggtaaccgagtttccatcggcctgacccgaagcgaataccagagccgatataacttcggttataccgacccctactggactgctgacggtgtgagcctgggctacaacgccttctatcgcaccactgactacaaagacctcgacgttgacgtagccagctatgcaatcgacagccttggtgctggcgtgaacgtgggttacccgatcagcgagacctcgcgtctgacgttcggcttgaccgcgcagcaggatgagatcaagaccggtgtctacaccgtggacgaaatcttcgacttcacccgtcgtgaaggtgacaagttcctgaacttcaaggcgtccgccggctggtccgagtcgaccctgaacaaaggtgtactggcgacccgtggtcattcccagagcctgaccctggaaaccaccacgccgggcagcgacctgtcgttcttcaagctcgactaccgcggccagctgttccagccgttgagcgacaactacaccatgcgcctgcacactgagctgggttatggcgatggttatggttccaccaatggtctaccgttctacgagaactactatgcgggtggcttcaactccgtacgtggtttcaaggacagcaccctgggcccgcgtggtactccgagccgtggtgttggtgtaaccggtaaccagggcaccgtagcggactccgacaacgacccactgccgttcggtggtaacgtcctgatccagggtggtgcggaaatcctgttcccgctgccgttcgtgaaagatcagcgctccctgcgtacttcggtattctgggacgtgggtaacgtgttcgactccaaatgcgagcagatccgtaacccgagcggcgtgaagtccaacactcagtgtaacgacgtgagcctgagtaacctggcaagctccgtgggtgtgggtgtgacctgggtgactgcgcttggcccattgagctttgctctggccatgccgatcaagaaaccggataacgctgaaacccagattttccaattctccctcggccagacgttctaagcgtctgacccaagataacgacaacggattctgtaggagtacatcgtgcgtaagttgactcaattggtgctgctggcaaccgtgctggtaaccaccccggccttcgccgaaatgaaaattgccgtcctgaactatcagatggccctgctggaatccgatgcggccaagaaatacgccgtggatgccgagaaaaaattcggtccgcaactgaccaagctcaagaccctggaaagcagcgccaagggcatccaggatcgtctggtagccggtggtgacaagatgcagcaaggcgagcgcgagcgtctggagcttgaattcaagcaaaaggcccgtgactaccagttccagtccaaggagctgaacgaagccaaggctgtagctgaccgtgaaatgctgaagcagctgaagccgaaactcgacagcgctgtggaagaggtcatcaagaagggtgcctttgacctggtgttcgagcgtggcgctgtgatcgacgtcaagcctcaatacgacatcacccgtcaggtgatcgagcgcatgaaccagctgaagtaagccatgaccgcgactatcaagctcggcgagttggccgagttcctgggggccaccttgcgtggctccccggagaaggaaatcactgggctagccaccttgcaggaggctggcccagctcagttgagcttcctcgcaaacccccaataccgtaaatacctggtcgacagccaagccgcagccgttttgctgaaggccgccgatgccgaagggtttgtcggggatgcgctggtggtggccgacccgtacctggcgtatgcgcgggtgtcgcacctgttcgatccgaaacccaaggccgccagcggtattcacccatctgcggtgatcgccgatgatgcccaggttgacgccgcagccagcatcggtgcctttgcggtgatcgagagcggtgcgcgcattgcggcggatgtgaccataggtgctcattgctttatcggtgcgcgctgcgaaatcggcgcaggcggttggctggcaccccgtgtaaccctgtaccacgacgtgcgtattggtgagcgtgtggtcatccagtcgggtgccgtgataggcggtgaaggctttggctttgccaattccaagggtatctggaacaagattgcccaggtcggcggcgtattgatcggcgacgacgtggaaattggtgtgaacacggctgtcgatcgcggggccctggccgacaccgtgatcggcaacggcgtgaagctcgacaaccagatccagatcgcccacaacgtacagattggcgatcacaccgccatggcagcctgtgtgggcatctccggcagcacccggatcggcaagcattgcatgctcgccggtggcgtcgggctggtggggcacatcgatatttgcgacaacgttttcatcaccggcatgaccatggtcacccactctattaccgagcctggggcctattcttccggtaccgccatgcagcccgcagctgaatggcgcaagagtgcagcacggttgaggcagctcgacgacatggctcgacgtctcaaacagctggaaaagcgtgttggggacgtgacccctggcggtaatgcttcatcagaaggctgataccatttccatatcaagtgtgcacagccgctagactgcctccttgatttgctagcggggcgtgcttttagttcgcccgcccccaatctttattacaggcttccccccgaaatgatggacatcaacgagattcgcgaatacctgcctcaccgttacccgttcctgctggtggatcgcgtagtggacctcaatgtcgaggaaaagcgcattcgtgcctacaagaatgtcagcatcaacgaaccgttcttcaatggtcactttcctgcgcatccgatcatgccgggtgtgttgatcatcgaggcgatggcccaggctgccggtatccttggtttcaaaatgctcgacctcaagcctgccgatggcacgctttactatttcgtgggctccgacaagttgcgtttccgcaacccggttactccgggtgaccagttgatcctggaagccaagttcatcagctgcaagcgccagatctggaagttcgaatgccaggcctcggtggatggcaagccggtgtgctctgccgagatcatctgtgcggaacgcaaactatgagtttgattgaccctcgcgcaatcatcgatccgtcggccgttctggccgccgacgttgaggtcggcccctggtcgatcatcggcgcaggtgtggaaatcggcgaggggactgtcatcgggccgcacgtgatcctcaaaggtccgacccgcattggcaaacacaatcgcatctaccagttctcctcggtaggcgaagacaccccggacatgaagtacaagggtgaagagacccgcctggtaatcggtgatcacaacatcatccgtgaaggcgtgaccattcatcgtggtaccgtgcaggatcgggctgaaaccaccctgggcgaccacaacctggtcatggcctacgctcatatcggtcacgacagcgtgatcggcaaccactgcatcctggtcaacaacaccgcgttggccggccatgtgcatgttgacgattgggcaatcctgtccgggttcaccctggttcatcagtactgccatatcggtgctcatagcttctccggcatgggcaccgccattggcaaggatgttccggcattcgtcacggtattcggcaaccccgccgaagcccgcagcatgaacttcgaaggcatgcgccgtcggggtttcagcgaagaagccatccacgccctgcgccgcgcctacaaggtggtttaccgccaggggctcacggtggaacaggcgttgacccaactgaccgagccggcagcgttgttcccggaagtcgcggtgttccgtgactcgatccaggcgtcgactcgcggcatcacccgctgatcatggctaatctgcgtatcgcgctggtggccggggaagcttccggcgacattctgggcgccggtcttatgcgggccctcaaagcccagcatcctgcggtggagttcatcggtgttggtggcccgctgatgcaggctgaggggcttacgtcctacttccccatggagcgtttgtcggtcatggggttggtcgaggtgctgggtcgcctgcgcgagctgctggcccgccgcaagttgctgatccagaccctgatcgaagaaaagcctgacgtctttatcggaatcgacgcgccggacttcaccctcaatatcgaactcaagttgcgccaggccggcatcaagacggtgcactatgtcagcccgtccgtctgggcgtggcggcagaagcgtgtgctcaagatccgcgaaggctgcgacctgatgctgacgttgctgccgttcgaagcgcggttctatgaagaaaagggcgtgccggtgcggtttgtcgggcacaccctggccgacactattcccttgcaggcggatcgcgcggccgcgcgtgccgagttgggcttgcccgacggccccttggttgcgttgatgccgggcagccgtggcggcgaagtcggtcgcctggcctcggtgtttttcgacgctgccgagcgtctgcaggccctgaagccaggcgtacgtttcgtgttgccctgcgccagcccgcaacgtcgtgcgcagatcgagacattgctggaagggcgcaacctgccgttgactctgctcgatggtcaatcgcacctggccctggcggcctgtgatgcggtgctgatcgcctcggggacggccacgctggaggccctgctgtacaagcgcccgatggtggtggcctaccgcctggcgccgctgacgttctggattctcaagcgcatggtcaaaagtccttacatctccctgcccaatctgctggcccagcgcctgttggtgccggagttgttgcaggacgatgcaacgccagaggcgctcgcgcaaaccctgctccccttgatcgacggcggcgaagaacagacccgtggtttcgacgctatccatcgcatactgcgccgtgatgcctcgaaccaggcggcagacgctgtattgacgttgatcggccagaaacaggaggcgatatgagtgcgcaaatgggcctggatttcagcctggttgccgaagcccacgaactggtggccggtgttgacgaagtcgggcgcgggcccttgtgtggcgccgtggtcacggcggcagtgatcctcgatccaaaccgtccgatcctcggcctcaacgactcgaaaaaactcaccgaagcgcggcgcgaaaagctctacgacgagatttgcgagaaagccctgagttggcacatcgcccgggccgaagttgaagaaatcgatgaattgaacatcctccacgccaccatgctcgccatgcagcgtgcagtggagggcctgcacatcacgcccaagctggcgatgatcgatggcaaccgctgccccagactggccatgccatcggaggcggtggtgaagggtgatagcaaggtgccggcgattgcggcggcctccatcctggcaaaggtcagtcgtgatcgtgaaatggcggctttcgaattgatctacccgggctatggcatcggcggtcataaaggctacccgacgcccgttcatctggaagccctggcacgtcttggccctacaccgatccaccgccgctcgttcgccccggtgcgtcaggcttacgaggcgcgggagagtctcagcgaggtgtagtcgcgaggctgatgtttttgccaaggcccggtacaatccgggccttgttgtctccacgtttctagacaggatcactatgccggcttcattcgttcacctacgcctgcacactgaatactccctggtcgacggcctggtacggatcaaaccgctggtcaaaaccctggtgggcatgaacatgcctgcggtcgcggtcaccgatcagaacaacatgtgttccttggtcaagttctacaagaacgccatgggcgccggtatcaagccgatctgcggcgctgacctgtggctgtccaacaaagacccggataaccccctgagccgtatcagcctgctggcgatgaacggcgtgggttatcgcaaccttaccgaactgatctcccgtggtttcatcgatggccagcgcaatggttcgatcatcatcgagcgcgaatgggtcgccgaggccagcgaaggcctgatcatgctgtcggccgccaaagagggtgagatcggtatcgcgctgctggggggcaacccccaagaagccgaagtactggccaaggaatggatgcaggtcttccccgaccgtttctacctggaagtccagcgtaccaaccggcccaacgatgaagagcacctgcacgccgccgtggccctggccgacaagctgggcgcgccgctggtggcgactaacgatgtgcgcttcatcaagaaggaagacttcgaagcccacgaaacccgcgtgtgcatcggtgaaggccgggccctggatgacccgcgtcgttcgaaaaactacagcgaagagcagtacctcaaaagcgccgatgaaatggccgagctgttcagcgacctgcccgaggccctggaaaactccgtcgagatcgccaagcgctgcaatatcgaagtgaagctgggcaagcacttcctgcccaacttcccgattccggatggcatgaccatcgatgaatatttccgcaaggtgtccttcgacgggctggaagagcgccttagcgttctgctgcccaaggacaccaccgaagattacgaggccaagcgccaggtctatgtggaccggctgaatttcgagctggatatcatcatccagatggggttccccggttacttcctgatcgtgatggactttatccagtgggccaagaacaacggcgtgccggttggtccgggccgtgggtcaggtgccggttcgctggtggcctatgtgcaaaagatcaccgaccttgatccgttggaatatgacctgctgttcgaacgtttcctgaacccggaacgggtttccatgcccgacttcgacgtcgacttctgcatggatggccgtgaccgcgtgatcgaatacgtggccgagaaatacggccgcaacgcggtcagccagatcatcaccttcggttccatggcggcgaaagcggtaatccgcgacgtggctcgggtgcagggcaagtcctacggcctggcggatcgcctgtcgaagatgatcccgttcgaagtcggcatgaccctggaaaaggcctatgagcaggaagaaatcctgcgcgacttcatcaaggtcgatgaagaagcggccgagatctgggagatggcccgcaagcttgaaggcgtggtgcgtaacgtcggtaagcacgcgggtggcgtggtcatcgcgccgacaaagttgactgacttttcgccgatctattgcgatgaagaaggcgacggcctggtcacccagttcgacaaggatgacgtggaggcggccggcctggtgaagttcgacttcctcggcctgcggaccctgaccatcatcgactgggcgctcaagaccatcaaccgcgaccgcgccaaggtgggcgaagaaccgctggacatcgctttcatcccgctggacgacaagccgacctacaccctgctgcaaaaagccgaaaccacggcggtgttccagcttgaatcgcgcggcatgaaagagctgatcaaaaagctcaagcccgactgcctggaagacttgatcgcactggtggcgctattccgtccaggcccgctgcaatcgggcatggtggacgactttatcaaccgtaagcacgggcgcgccgagctggcctacccgcactcggactaccagtacgaaggcctcaagccggtattggcaccgacctacggcatcatcctgtatcaggaacaggtgatgcagattgcccaggtgatggccggttacaccctgggtggcgcggacatgctgcgtcgagccatgggtaagaaaaaacccgaggaaatggccaagcagcgcggcggtttcattgaaggctgcgcgaccaacaatatcgacgccgacctcgcgggtaacatcttcgacctggtggagaaattcgccggttacggcttcaacaaatcccactccgccgcctacggcctggtgtcgtaccagaccgcctggctgaaagcccactacccggcgccgttcatggctgcggtactttcggcggatatgcacaacaccgacaaggtcgtgaccttgatcgaggaagtgcgcaccatgaagctgcgcctcgacgcgccggacgtgaacgcttcggagttcaagttcacggtgaacgatgaaggccgcatcatctatggcctgggcgcgatcaagggcgtcggcgaggggccggtggaagccatcaccgaagcgcgccaggacggtccgttcaaagacttgttcgacttctgcgcacgggttgacctcaagcgcatcaacaaacgaaccctcgatggcctgatccgcagcggcgcgctcgaccgtctcggcccgtatttccatgatgagcccaaggcttatcaggccaatatcgaccgtaaccgcgcggtgctgctcaccgccatggaagaagcgatcaaggcggccgaacagactgcccgcacccatgacagcgggcatgccgacttgtttggcgggttgttcgtcgaagacgatgcagatgtgtacggtaaccaccgcaaggccaaggaactgaccctcaaggaacgcctcaagggcgagaaagataccttgggcctgtaccttaccggtcacccgattgacgagtacgaaggtgaaattcgccgcttcgcccgtcagcgcatcatcgacctgaaaccggcgcgggatacccagaccgttgcaggcatgatcatcgccctgcgggtgatgaagaacaagaagggcgacaagatgggttttatcaccctcgacgaccgctcgggccgcatcgaagcgtcgctgtttgccgacgcgttccactccgcccagtcgttgttgcagaccgatgccatggtggtcgtcgaaggggaggtcagcaacgatgacttctccggtggcctgcgcctgcggatcaagcgggtgatgagcatggaagatgcgcgcaccaatctggccgaaagcctgcgtttgaaggtgaaaaccgaagcgctcaagggcgatcagctacgctggttgggcgacctgctcaaacgccaccgtggtgcatgcccggtgaccatggagtacaccggcaatgacgccaaggccatgttgcagtttggcgagacctggcgaattgatcctgcggatggcttgattcaagctttgcgtgaccagttcgggcgagacaacgtcttcctccaataccgttgacggtcagatatgtctgacctcggctaaacatttaatctcgacctaaacgcgcctctcccttaaggtagggcgcgaatagacaaccggctggccaggcacgccctggccgtcgacccaagacggacgcttatgaacccgaattttcttgatttcgaacagccgatcgctgacctgcaagccaagatcgaagagctgcgcctggtcggcaatgacaattcgctgaatatcggcgatgaaatctcccgcctgcaagacaagagcaaaacgctcaccgaagacatcttcggcaagctgaccagctggcagatcgcgcgcctcgctcgccacccgcgccgtccttacaccctggactacattcagcacattttcaccgagttcgacgagctgcatggcgaccgccatttctccgacgacgccgccatcgtcggcggtatcgcccgcctggacgaccagccggtgatggtgatcggtcaccagaaaggccgtgaagtgcgcgagaaagtccgtcgcaacttcggcatgccgcgtccagagggctaccgcaaggcgtgccgcctgatggaaatggctgagcgcttcaagatgccgatcctgaccttcatcgacaccccgggcgcttatccggggatcgacgccgaagagcgcaaccagagcgaggctatcgcctggaacctgcgcgtcatggcccgcctgaaaaccccgatcatcgccaccgtcattggtgagggtggctccggtggtgcgctggccattggtgtctgtgaccagttgaacatgctgcaatactcgacctacgcggtgatctcgccggaaggttgcgcctcgatcctgtggaaaaccgccgaaaaggcaccggacgctgccgaagccatgggcattaccgctgatcgcctcaaaggcctgggtatcgtggataaagtgatcgccgagccattgggcggcgcccaccgtgacccggctgccgccgctgcgaccatccgcgccgaactgggctcgcaactggcgatgctcaagaagctggataacgaagcgctgctggcccgtcgttacgagcgtctgatgagctacggcctctaagacccacgcaatacccaaatgtgggagggggcttgcccctcccacatttgctttgtgtatgcttggtgggcgtattacagatcagaggcggtaacttgctatgaaaccggctctgcccgccagactcttgcaaaccctggccccctggcgcagcgccccggcctggcacattgcgttctccggcggccttgattccaccgtcctgctgcacctcctggccaacctggccaaaaccgagaccctgccccccctcagcgctgtccatgtccaccatggcctgcaggctgccgccgacgcgtggcccgctcattgccagtcgatctgtgacagcctgggcgtgcctttgcgcgttatgcgtgtgcaggtgcggcccggcgccagtcttgagcgtgccgcccgtgacgcgcgttaccaggcttttaccgaggtggccggggcagggcaggtagtgctgacgggccagcaccgcgatgatcaggctgaaaccctgttgtttcgactgctgcgtggggctggggtgcgtgggctggcagcgatgcccgtgcagcgtcgattggctggtggcgacttggtgcggccgctgttgaatgtctccagggcggagttggaagcctacgcccacacgcatcagctccaatggatcgaagacccttccaacgcagattcgcggttctcccgtaattacctgcgccaccgcgtgcttcctgcactgatggagcgttggccccaggccgtctcaagcctggcgcgcaccgccgaacacctgagtgaagcccagggcctgctcgatgagctggcgcagatggacctgcaggccgccgaccaaccgtccccctttccctggctgcctctaccgtccttggcccttgcaccgctgcgcgagctttccgatgcccgtcagcgcaacgccctacgtaattggctgacgccgctgacgcgcctgcccgacagcgaccactgggcaggttggcattccctgcgcgatgccaaggtcgatgcacagcccctgtggcgcctggccgacggcgagttgcaccgtagcggcgaacgcatctggtggctgcctatcgcatgctcggaattttctgacgcatcgctgagctggcccgatccgcaaaacccactagagttacccggcaatggccagttgacgttcaccggcaaggtgcccgaagggccgctggagatccgctaccgccagggcggcgaaatcatcgaagtacccggtcgcggccggcgtgacttgaagcgcctgcttaacgaaagtggcctgccgggcttcctccgtggcagattgccgctgctgtatcaaggcccgcagttgctgggcgcgcccagccttgcgggactgtggccgtcggcaagtgatggctggcaattacattggatgccacagacctgcgatcaaggtttgagctgatagcgcctttccggtagactacgctcccttcttgatacaacttctgtggattcgactgaatcgcagcagttgccgattaccaagcagtctttgctgggcgattccaaaaaatgtgtagcgatcaacgtaccggtgtttcattgctggtctgtcaccacgcggcggtttttttgaaaggtgcactgtgattaatgcaggtgatcgggggcttcggccttccttcgctttccccggcggctcggaccgctttaacgcagacttctagggtttttcatgacgcgctacatattcgtcacgggcggtgttgtttcttcattggggaaaggcattgcctccgcttcattggcggccatcctggaggcgcggggacttaaggtcaccatgctcaagcttgacccctacatcaacgttgacccgggcaccatgagcccgttccagcacggtgaagtgttcgtcacccacgacggcgccgagactgacctggacctgggccactacgagcggttcatccgcacgaccatgacccagaacaacaacttcaccaccggccgtgtctacgagcacgtgctgcgcaaggagcgccgtggtgactacctgggtgcaaccatccaggtgatcccgcacatcaccgacgaaatcaagcgccgcatcatcaagggtgccggcgatgccgacgtggcgatggtcgagatcggtggcaccgtgggtgacatcgaatcccaaccgttcctcgaagccatccgccagctgcgtttcgaagtcggcgccaagcgcgcgatgctgatgcacctgaccctggtcccgtacatcgccaccgccggcgagaccaaaaccaagcctacccagcactcggtcaaggaactgcgttccatcggcctgcagccggacgtgctggtgtgccgctccgatcacccgatcgacatttcctcgcgtcgcaagatcgcgcaattcaccaacgttgaagaacgtgcggtgatcgcgctggaagacgccgacaccatctacaagatcccgggcatcctgcattcgcaaggcctggatgactttgtggtcgagcgcttcggactgcaatgcaacggcgcagacctgtccgagtgggaagccgtggtcgacgccaagctcaaccctgagcacgaagtcaccatcgccatggtcggcaagtacatggaattgctggacgcgtacaagtcgctgatcgaagcgatgagccacgccggtatcagcaatcgtaccaaggtcaacctgcgctacatcgactccgaagacattgagaaccagggcaccgccctgctcgaaggtgtggacgcgatcctcgtgccaggcggtttcggcctgcgtggcgtggaaggcaagatcactgccgtgcagtacgcccgtgaaaacaaggtgccttacctgggtatctgcctgggcatgcaagtggccgttatcgagttcgcccgtaacgtgctgggctggaaagacgccaactccaccgagttcgacagcaagagcggtcacccggtcgtgggcctgatcaccgagtgggaagatgccaccggcgcggtcgagacccgtaccgaagcctccgacctgggcggcaccatgcgccttggcgcgcaggattgcctgctggaagccggctcgctggttcacgattgctacggcaaggacgtgatcgtcgagcgtcaccgtcaccgctacgaagtgaacaacaacctgctgccgcagattaaagaggccggcctgaaaatctccggtcgctccggtgatggcgcgctggttgaagtggtcgaggcaccggatcatccgtggttcgtcgcgtgccagttccaccctgagttcacctcgacgccgcgcgacggtcacccgttgttcagcggtttcgtcaaggcagccctgacgcaacaccagaagaaggcgtaaccctgatggcccagaagatcattcgcgtaggcgacatcgagattgccaacgacaagcccatggtgctgttcggcggcatgaacgtgctggaaagccgcgacatggcgatgcaggtctgtgaagagtacgtcaaggtcacccagaaactgggtatcccttacgtgttcaaggccagcttcgacaaggccaaccgttcgtccgtgacctcctatcgcggcccgggccttgaagaaggcatgcggatcttccaggacatcaagcaagccttcggcgtgccgatcatcaccgacgtccacgagcctgaacaggctgccgtggtcgccgaggtgtgcgacatcatccagttgccggccttcctgtcgcgccagaccgacctggtcgtcgcgatggccaagaccggcgccgtgatcaatatcaagaaagcccagtttctcgcaccccaggagatgaaacacatcctgaacaagtgcgtggaagcgggtaacgaccagttgatcctctgcgagcggggttcgagcttcggctataacaacctcgtggtggacatgctcggtttcggcatcatgaaacagttcgaatacccggtgttcttcgacgtgacccacgcgctgcaaatgcccggtggtcgcgccgattccgcgggcgggcgccgtgcccaggtgctggacctggccaaggcaggcatcagccagtccctggccggcctgttcctggaagcccacccggacccggacaacgccaaatgcgacggcccatgcgccctgcgcctggacaagctggagccgttcctggcccagctcaagcagttggacgaactggtcaagagttttccgacggtagagaccgcgtaagcgtcgtttctccggtagactttcccacgctttacgctcaggcctgcgggcctgggccttgtcgcctgcaagcctgccccgttgttccacccttgcggtcggtcaaaagattcccttcagctgcgtcgttttcgtcaactttggagtgtttacaacaatggcaaaaatcgtcgacatcaaaggtcgtgaagttctcgactcccgtggcaaccccaccgtcgaagccgacgtgcttctcgataacggcatcatcggcagcgcctgcgcgccgtccggtgcttctaccggttcgcgcgaagcgctggaactgcgtgatggcgacaagagccgttacctgggcaagggtgtactgaaagctgttgccaacatcaacggcccgatccgtgacctgttgctgggcaaggatccgctggaccagaaagccctggaccacgcgatgatcaagctcgacggcaccgaaaacaaaggcagcctgggcgccaacgccatcctcgccgtgtccctggccgctgccaaggccgccgcacaggaccaggacctgccgctgtacgcgcacattgccaacctgaacggcaccccgggtgtctactcgatgccggtgccgatgatgaatatcatcaacggtggcgagcacgccgataacaacgtcgacatccaggaattcatggtacagccggtcggcgccaagtccttctccgaaggcttgcgcatgggcaccgagattttccatcacctcaaggctgtgctgaaggcccgtggcctgagcactgcggtgggtgacgaaggcggttttgcaccgaacctggcgtccaacgaagatgcactgaaagtgatctccgaagccgtggccaatgctggctacaagctgggcaccgacgtgaccctcgccctggactgcgcggccagcgagttctacgaggacggtaagtacaacctgtccggcgaaggccaggtgttcaactccgaaggtttcgctgaatacctgaagggcctgacccagcgctacccgatcatctcgatcgaagacggcctggacgagtccgactgggacggttggaaaatcctcaccgacaagatcggcgagaagatccaactggtgggcgacgacctgttcgtgaccaacaccaagatcctgaaagaaggcatcgataaaaagatcgccaactcgatcctgatcaagttcaaccagatcggcaccctgaccgaaaccctggaagccatccagatggccaaggctgcgggctacaccgccgtgatctcgcaccgctccggcgaaaccgaagactcgaccattgccgacctggccgtgggcacctcggccggccagatcaagaccggttccctgtgccgttccgaccgtgtttccaagtacaaccaattgctgcgtatcgaagagcaactggctggcaaggccaagtacaacggtcgcggcgagtttcgcggctgatcgctagttgatggtgaaacatggtaaaaagtcggcggattgcgtcggaaaactcacgacagtgtggatttcggcgctaatctgatggctatcaagcacaagcctggtttttccaggcttcgtgctatcagttgctgcaaaagttttgcatggcggtcttttttcactggatacccgatattcgatgcgcagtcccaattggttgttcctcgtcttgctcttgttgctggctggcctgcagtaccgcctatgggtgggtaatggcagctttgcgcaggtaaaagacctgacccagcaaattgccgaccagcacgccgaaaacgaacgcctgctggagcgtaaccgcgtcctcgatgccgaagtgcttgagctgaaaaaaggtacggagaccgtggaagagcgggctcgtcatgaattgggcatggtcaaggagggcgaaaccctctaccagttggcccaatgagtaaccgtttgccggccttctgggccgtgattcctgccgcgggcgtcggtgcccgtatggccgcggaccgtcccaagcaatatctgcaactgggcgggcgcactattctcgaacacagtcttggctgttttcttgaccatccagaccttaaagggttggtggtcagccttgctgtcgatgatccttactggcccaacctgccttgcgccaacgacccacgcatcgtgcgtgcggatggcggcgacgagcgttcggggtctgtgctcaatgcgctgctgcaactcaatgccctgggcgccagcgatgacgattgggtgttggtgcacgatgcggcacggccgaacctgagtcgtgatgatctcgacaagttattaagcgaactgttgaacgatcctgtgggtggtctgttggccgtgccggcccgcgacactctcaagcgcgtcgacaagcatggccgcgtggtcgagaccgttgatcgcagcttgatctggcaggcttatacgccgcagatgttccgcctgggtgccttgcatcgcgcgttggctgacagcctggtggcggatgccgtcatcaccgacgaagcctctgccatggaatggtccggccaggcgccgcgcctgatcgaagggcgctcggacaatatcaaagtgacccggccggaagatttggagtggctgcggttgcggtgggctaaccgcaggtaattcgcgataccgtgtcgaccccatcgggggcaagccccctcccacattgaaatgcattccaagtgtgggagggggcttgccccctatgaggcccctccaaacaaccaacagtcaactgctgtactccggcctctcagccaacccctccttcaagaaatccaccaatttcctgaccttcggcgacaaatgcctttgctgcggatacaacgcccacaccgccgtattcggcggctgatgcgcctccagcaacgacaccagcgccccactgtgcagatgctcgagcacgtaatagtctggcaactggcacaacccgacgccctgtagcgccgcatccaacaccgcttgcccactgttgcagcgccaatttccctgcacgcgctgggaaaactcccgcccgtcctgggccagttgccagatatccgagctgccgatcaggcagttatgccgactcaattccgacaagctatgtggccgaccataccgagcgaggtaggacggcgacgcacacaggtacatgcgtcgaggtgcgaggcggctggcgaccatgcgcgaatcctgcaagcgccccaggcggatcgccaggtcgaggccttcatgcaccaggtccagttggcggttgctcagttcgatatccacccgcaactgcggatacagccccatgaagcgtgtcaccagcggcacgataaagcgctcgccatatgccacggcacaggtcatgcgcaacatgcccttgggctcgctggtgagatcgcccaccgcacgcagcgcttcctcacgcccgtcctgcaggcgttggcagtgttgcaagaaggtctggccggcctcggtcagggtcaccttgcgcgtactgcggtacagcaaccgggtttgcaggcgttcttccaggcgcgccacctgccggctgatatgggaagacgacacccccagccgttccgccgccgccgtgaactggctgcattcggccactgcgacaaactcatcgataccttcccagcggttttcaagcatgtcgattatccccatgcagcaataaagttttgcttttgcctggattattcatcagctagccatgttttacactcgtcgcctcagtttttaaccccgatggagaaacccggatgatcaagtcccgcgccgccgtagccttcgaagccaagaagccccttgagatcgtcgaagtggatgtcgccatgcccaaggcgggtgaagtgctgttgcgcgtggtcgcgtccggcgtgtgccataccgacgcctacaccctgtcgggcgccgacccggaaggcatcttcccgtcgatcctcggccatgaaggcggtgcggtggttgaggcgatcggtgagggcgtgacgtcggtagccgtgggcgatcacgtcatcccgctgtacaccccggaatgcggcaagtgcaagttctgcctgtcgggcaagaccaacttgtgccaggccatccgttccacccaaggcaaaggcctgatgccggacggcaccacgcgtttctcctacaaaggccaaccgattttccactacatgggcacctcgaccttctccgagtacaccgtgctgccggaaatttccgtggccaagattcctaaagaagccccacttgaaaaagtctgcttgctcggttgcggcgttaccaccggcatcggtgctgtgatcaacaccgccaaggtcaagccaggcgataccgtagcgatcttcggcctcggcggtatcggcctgtcggcagtgattggtgcggttaaagccaaggcaggtcgcatcattgccatcgacatcaacccggccaagttcgaaatcgccaagcagctgggtgcgaccgattgcatcaacccgaaagactacgatcgtccgatccaggacgtgatcgtcgacctcaccgacggcggcgtggacttctccttcgaatgcatcggcaacgtgcaactgatgcgcgccgccctcgagtgctgccacaagggctggggcgagtcggtgatcatcggcgtggccggtgccggccaggaaatcgctacccgcccgttccagttggtgaccggtcgcgtctggcgcggttcggccttcggtggcgtacgtggccgctccgaactgccaagctacgtggaaatggcccagaccggcgagatcccgctggacaccttcatcacccacaccatgggcctggaagacatcaacaaagcgtttgacctgatgcatgaaggcaagagcattcgtaccgtcatccacttctgaggttcgccatgagtctggaaaacctgtcgtgccagaagagcttcggcggctggcataaacgctacaagcatcattccgatgtgctcggttgcgacatgaccttcgccgtttacctgccgccgcaagcggagcagggcggcaaattgccggtgttgtactggctgtcgggtctcacctgcaccgatgagaacttcatgcagaaggccggcgcccagcgcatggctgccgagctggggttgatcattgtggcgccggacaccagcccgcgtggtccgggtgtgccgggcgacccggacaacgcgtgggatttcggtctcggcgccggcttctatttgaatgccacccaggaaccctgggccaagcactatcggatgtatgactacgtcgtgcaggaattgccggcgttgatcgaagggcatttcccggcgtcggataagcgcggcatcagcggccactccatgggcggccacggtgcgctggtgtgtgccttgcgtaaccctggacgttacctgtcggtgtcggcgttttcgccgatcaacaacccgatggattgcccatggggccagaaagccttctcccgctacttgggtgaagagcgttccaagtggcgcgagtgggacacctgtgtactgatcggcgaagcctcggaaaagctgccactgctggtggaccagggcgaccgcgacgatttcctcgccgtgcaactcaagcctgaagccctgcaacaagcggccaaggcagccaaccatccgctggaactgcgcctgcaacccggctacgaccacagctacttctttatcgccagcttcatcgaagaccatttgcgacaccatggccgtgctttgctcggttaatgtgaggcaaaagtaggtagaatcacgccctgaattaaatcggggcgtttttttatgcgtattggccacggctacgatgtgcaccgtttcgccgaaggcgatttcatcaccctgggcggcgtgcgtattgcacaccaccatggtttgctggctcattccgacggcgacgtcgtgttgcatgccttgagcgatgcgttgcttggcgcagcggcattgggcgatatcggcaagcactttccagacaccgacccgactttcaagggcgcggacagccgtgtcttgttgcgccatgtggttggcctggtccatgccaagggctggaaggtcggcaacgttgacaacaccatcgtggcccaggcgccgaagatggccccgcatatcgagtcgatgcgcgcgctgattgccgccgacctgcaaattgaattggatcaagtcaacgtgaaagccaccaccactgaaaagctcgggttcaccggccgtgaagagggcattgccgtgcactccgttgccttgttgctgcgcgcatgaatgacctgcaactgctgggcccgcgagcctatggcgaggccttgggcagcgcggtactgaaggcgacggccgaagacttccaggtcgacgaggtgctggacattccgctgaccggtgaaggcgaacacctgtggttgtgggtggaaaagcgcggcctcaataccgaggaagctgcgcggcgtatcgccaaggcggccggggtgccgttgcgcaccgtcagctatgccgggctcaaggatcgccaggcgttgacccgccaatggttcagcgtgcaactgccgggcaaggccgacccggacatgagcgcggcggagaatgacacgctcaagattctcaagaccggccgccacaagcgcaagctgcagcgcggtgcgcattcggccaatgggttcactttgcgcctgacgcagttggccggtgataccgccgccatcgatgcgcgcttgcaacagattgcccaacacggcattcccaactatttcggtgcccagcgctttggccacaatggcggcaatgtcgtggacgctcgcgagtgggccgcccgcaaagccttgccggagcagcgcaatgtgcgttcacggttgctgtccaccgcccgcagctttttgttcaacaaagtgctggccgcgcgcgtggccgatggttcgtggcaacgtgcccaggtcggcgacctgctggcgtttaccgacagccgcagttttttcccggctggcgaagcggaatgcagcgacccgcgcctggccattctggacctgcacccgaccgggccgcagtggggcgagggcgactcgccagccagtggtgcaaccttcgagctggaacaggcggttgccgctggtgaagccgacttgcgtgattggctggtgaatgccggcatgagccaggaacgtcgcattcttcgactgcccattggcggtttgacgtggcattatccctcgctggacattctgcaattggaattcgtcctgccggccggatgcttcgccactgtgttggtgcgcgagcttgttgatctggtgccggtggggcagacggacaacccatgcgtattctgatatcaaacgatgacggtgccaccgcacccggtcttgccgcgctctatgctgcgctgcaggattatgccgagtgcgtggtggttgcccctgaccaggacaagagtggcgccagcagttcgctgacgctcgaccgtccgctgcacccgcaagtcttggccaatggctttatcagtgtgaacggcacgcctaccgactgtgtccacctggcaatcaacagcctgctggaccaggcgccggacctggtggtgtcgggcatcaacctcggtgcaaacctgggggatgatgtgctgtattccgggaccgtggcggcagcccttgaggggcgcttcctgggccgtaccgggttcgccttttcgtttgcctcgcggcaactggataacctggcaaccgccgcgcatttcgcgcgcaagctggtggaggcccatggctctctggacctgccaccgcgtacggtgctcaacgtcaatattcccaacctgcccctcgatcatattcgcggcatcaagctgacgcgcctgggccatcgcgcccgtgcggcggcgccgttgaaggtggtcgacccgcgtggcaaggaaggctattggatcgcagcggcaggtgatgctgaagatggtggtgaaggcacggactttcatgcggtgatgcaaggctatgtgtcgattaccccattgcaatttgatcgcaccttcagtgatgccttcagtggtctcgatggctggctggaggggctgcgctgatgggccgtgaacaagacgacttgctgcgccggggcatcgggatgacgtcccagcgtacccgtgaacgcctgatccagcgcctgtacgaagaaggtttgtccaacgcccaggtgctggaagtgatccggcgtacgcctcgccacctgtttgtcgatgaagccctggcccaccgtgcctatgaagatacggcgctgcccatcggccacaaccagaccatctcccaaccgtacatggtggcgcgcatgagcgagctgctgctggcggcggggccgttggacaaggtgctggaaatcggcaccggctccggctaccagactgccgtgctggcgcaactggtggagcgggtgttctcggtcgagcgcatcaaggtgctgcaagaccgggccaaggagcgcctggtggagttgaacctgcgcaacgtggtgttccgctggggggacggctgggaaggctggccggcgctggcgccttacaacggcatcatcgtgaccgccgtggccaccgatgttccgcaagcgttgctcgatcaacttgcccccggcggacgcctggtgatcccggtaggctccggcgaagtgcaacaattgatgctcattatccgtgaggatgaaggcttttcccggcatgtgctgggggccgtgcgttttgtgccgttgctcaatgggccgctggcctgatcatttgttcgcgggcagtgaattctgttggcggggatgtgtcttacggcggggtctatcgagtcaacatgatcgggagtcggaattaaacgcgatgaatgtttcgtttccggcgtgtgacggtaaaactccaatgcccagttatacttgcgtcatatttcaagcctgatacaggcattcatgttcagccaccacaaagggagcggcgggtgagtctcacaggtcttgcgcagggtatgagtaaaacaagctttcatcgactggtgcttggcctcgtcttcagttccgtgctggtcggctgctccagctcgccaagcagcggcgcacgggtggtggaccgtaataatgccgtgccgcaaaagccgacggtgaccaccgggcaatacgtggtgcgcaagggcgatacgatgttctcgatcgccttccgctatggctgggactacaaggcgctcgcagcccgtaacaatattcctgtgccctacacgatacatcccggtcagacgattcgcttcgacggccgtaccggttctgcgcctacgacagttgtgacaaacactggatcttcgccgtcgtcctccagcaaaaccaccatcattacccgccctgcaggcaccgccgcacctacccctgcaagcaagccggcacccgcgccgttgccacctgccgggcctgcgccgaccggctggggatggccctcaaacggagtgttaattggaaaattctcttcaaacggtagtttgaataaaggcattgatatcgccggagatttgggacagcctgttttagctgcgtctgatgggacagtggtgtacgccgggagtggtttacggggctacggcgagctggtcatcatcaaacacagcgacacctacgtcagtgcttacggtcacaaccgcaggctgttggttcgggaggggcagcaggtcaaagtcggacagacaattgccgaaatggggtcaactggtacagaccgggtgaaactgcactttgagattcgccgtcaagggaagcctgtagatccgctgcaattcctaccccgtcgttgatgtgttgcacagcctgttccctcacgtagaaggaacaggctccagcgttgccaaggataaaggcgccgcttgagcttgaggtcgaactcaccaaaggactataacaatggctctcagtaaagaagcgccggagtttgacatcgacgatgaggttctcctgatggagaccggtatcgctacggaatcgatgtcgaatgagggacctgctgtaccttcagttcgcaccaaatccaagaactccaccgcgttaaagcaacacaagtacattgactacactcgggcgctcgatgcgacccagctgtacctcaatgaaatcggcttttcccctctgttgactcccgaagaagaagtccattttgcgcgcttgtcgcagaagggcgatccggctgggcgcaaacgcatgattgaaagcaacctgcgcctggtggtgaaaatcgcccgacgctatgtcaatcgtgggctgtccctgttggacttgatcgaggaaggcaacctgggcctgatccgggcggtggagaagttcgaccctgagcggggcttccgcttttcgacctatgccacctggtggattcgccagaccatcgaacgggcgatcatgaatcagacccgtacgatccggttgccgatccatgtggtcaaggagctcaacgtctacctgcgggcagcgcgtgagcttacccaaaaactcgatcatgaaccttcgcccgaagaaatcgccaacctgctggaaaaaccggtaggggaggtcaagcgcatgctgggccttaacgagcgtgtgtcttcggtcgacgtctcgctgggtccggattcggataaaaccctgctggacaccctgaccgatgatcgtcctacggatccttgcgagctgttgcaggatgatgatctgtcccaaagcattgaccagtggctgtcggaactcacggacaagcagcgcgaggtggtgattcgccgcttcggcctgcgcggccatgagagcagcaccctggaagacgtaggcctggagatcggcctgacccgtgagcgggtgcggcagatccaggtagaagggctcaagcgcttgcgtgagatcctggagaagaatggcttgtcgagtgagtcgttgtttcaataacgaattggcttgaatgcttgaatgtgggagggggcttgcccccgatagcgatggttcagtcaaatctgtattgactgacacactgcaatcgggggcaagccccctcccacattggtttatgccgtatcttatttgcagatagggccaaatcccaggcataaaaaaaccccgcttttaagggcggggtcttttcgactaagtcagtacaagttagataacttgaacttcttcagcttgcatgcctttctgaccgcgggtagcgatgaaagaaacctgttggccttctttcaggcttttgaagccgtcggattggatagctttgaagtgaacgaacaggtcgtcaccggattgtggagtgatgaagccgaagcctttttcatcgttgaaccacttaacggtaccagtttggcgattagacatggtgtatctccttggacaaagttaactgcgactcaggaaaagccctggccgagactgagtgcaaagagcaggaaaaattcttggagatggttggatcgaaattcaacatatcgtgtagagattctcagtgacacaagcagcacagtggcgccaccttaaccctttttccggaacgtgccaatggtatttccgaaggtttctccattttcgtgactggcggtggtatttgcggtcaccttgcacggcaatatgggtcccggccccgctggctgtggcttatagcagcaggcgcgttcatcaagaaaagccgcgtggcctttgaaccccaacgccggccccggtaagatgccccacagaatttttccacctcgctattcaggacacccgccatgagcatcaaatcggacaagtggattcgccgcatggcgcaagaacacggcatgatcgaaccgttcgtcgagcgccagatccgtggccaaggcgatgccccggtgatttcctacggcgtttccagctacggctacgatgtgcgctgcgccgatgagttcaaggtgttcaccaacatcaactcggcgatcgtcgatccgaagaacttcgacgaaaagagcttcgtcgacgtcaagagcgacgtatgcatcatcccgcccaactccttcgccctggcgcgcaccgtggagttcttccgtatcccgcgtgacgtgctgaccatctgcctgggtaaaagcacctacgcgcgttgcggcatcatcgtcaacgtgacgccgcttgagccggagtgggaaggccacgtgaccctcgagttctccaacaccaccaccttgccggcgaagatctatgccaacgaaggtgtggcgcagatgctgttcctgcagtccgacgaggcctgtgaagtgtcctacaaagaccgtgccggcaagtaccagggccagcgcggcgtcactctcccacgcgcctgatcgaaaggtcttacacgcaaagggaattagtctgcggaaagtgactctatctaggtgtactgcctcggcgcgtgtaaaacgcgccgggccacgcttgaggagtaccttatgaagctcgacccgcgaatcagcgcagaacttgcccggcttgaacccaaccagattggcgttctggcctggtccttgatggccgaccccgcatacgggggcggcatccccggccaacctgagccggactacccccaacccgccgaacccggtgagccgaccctgccggacgagccaccacccgcacccgttgcctgatacctagcccacaggccacacctcctgatcgccgaccacaaagagtcggtggtcatcggcctgctccaccgcaaatccaccggtaaacgcgccaaacgccggcaacaagctgacccgcgtcccgatctgaaagcacggcagccgcaggctttgccggcccttgccacgcaagcgatacaccggatgcacatgccccgccagcacgtggtggctggggtgggcatccggttcgtgctgcaaggcaaaggggcccatcagcagcggttccggcaccacttcaatcttcaggtcgggcggtgggtcaccggcgcgtttatcgtgattgccgcgcaccagggtcaggggcaacgagggatgacgctcgcgccaagcccgcaacgcgcccagtgtgccgctggcgtgggagccggggccatgcaggaagtcgccaagaaagatcacctgcgcgcacccatgggtagcgagcagccggtccagccgctcaaggttggcagtggtggtcccttgcggcaccggctgccccaggctgcggtacgccgaagccttgccaaagtgcgcatcggcaatcaacaggcacccgcgcgcaggccagtagatcgccttgtctgccagcaaccacaattgctcaccttccagcgttatcgaacagaccatcagcgcttcccgttatccgcgaccttttccaggtccttgaccattcgtgcaatgcgctccgagagtttttccgaactcatgctttcgcgcatccgctcgaccagcagcggaaaagccaggggagtcggccgttcgatcaggtgcaggtccagtttcagcgccgacagatgacgcaacgtcgcttccaagcgacgaatatccaattcatcgcgcaggacttcttccccggcttgggtcagtaatcggttctgtgggtcatattgcttgaacacctcgaagaacaaaccgctggacgcctgcacctgccgcgtacttttcggtgcgccgggatagccggcgaacaccagcccggcaatgcgtgctatctcgcgaaagcggcgcagggccagttccccggcgttcaggctggccgccacgtcttccaacaggttttcagggctcagcagcgcctcattcaataatccgggccaatccacaggcgtggcgctcaataactccagcccgtagtcattcacggcaatcgaaaaggtcactgcctgcccctggctcacccgccacgccaacagactcgccagccccaggtgcacctggcgcccggcgaagggatagagaaacaggtgccagccttcccgggatttcagcgcttctgccagcagatgctcgcgcgtcggcaggccggaccagcgcaactgcgtctgcaagaggggttgcaccgcgcgcatctccgggcctttaaagtgcccgtgcgccgccgcatcaaaacgctccaccaccgcctgggccagctcgttggaaagcggcatgcgcccgccattccagcgcggcacggcggcttttttggcgctgctgcggcgcacgtaggcggtcatgttttccacacgcaccagctccagcaggcgcccggcaaacaggaaaccatcgccgggcttgagccgcgcgataaaaccttcctcgacactgcccaggttcttgccgccaccgcccttgctccagtacttcaagtggatgctcgcgtcactgacgatggtgcccacgctcatgcgatgacggcgcgccaggcgggcatcggggacgcgccagatgccctgttcgtccggctccacgcggcggtagtccggataggcggtcagcgacagaccgccatggcgcacaaaccccagcgcccacgcccagtctgcgtccgtgaggtcgcggtacgcccaggccccgcgtacttccgccagcaacgcatccggcgtgaacccgccgcccagcgccatgctcaccaaatgttgtacgagtacatccagcggtttgtgcggcgattcccgcgcttcgatgcgtcgctgggcaattgcatcctgggccgccgccgcttccaccagttccaggctgtgggtcggcaccagcgtcacccgcgagggccgccccggcgcatgccccgagcgcccggcgcgttgcatcaggcgtgcaacacctttggccgagccaatctgcaacacccgttccaccggcaggaagtccacccccaggtccaggctggaggtgcacaccacggccttgagttggccgtccttcaacgcccgttccacccagtcgcgggtctctctggacaatgaaccgtgatgcagggcaatcaccccagcccagtcgggccgggcgtccagcaacgcctggtaccagatttccgactgcgcccgggtattggtaaacaccaggcaactgctgctgctttcgacctcggccaccacctggggcaacatcttcaagccgatatgcccggcccagggaaagcgctcggcaagcggcggcagcaaggtgtcgaccttcagctctttggccgtttgcccctgtacattgatcccgtcgccttgtgggaccaacacctccaaggcgtgggattgattacccagggtcgctgaaatgccccacaccatcaaacccggatgccagcgccgcagccgcgccagcgccagttgcaactgcacgccgcgtttgttgccgatcaattcatgccattcatcgacgatcaccatgcgcacgtgtgccaggctcacttcgctgtcggcgcgggccagcatcagggtcaggctttccggggtggtcaccagggcggtgggctggcgccgtgtctggcgggcgcgctcgctgctgctggtgtcaccggtgcgcaggccgacgctccagggaatctgcagggcttccagcggtgcttcgagggcgcgtgcggtatcggccgccagggcccgcatgggcgtgatccacagcaccgtcagcggttcagcgggcggtttgcgtttacccgtcacgggcgggcgagtgatggcgaagcgattgagcgccgcgaaccatagcgcgtaggtcttgccggcgccggtgctggcatgcagcaatcccgactgaccgcccttgactgccgcccatacctctttctgaaaagcgaacggcttccagcctttggcggcaaaccactgtttggcgaagtcgatgggttttgccatggggcggcgcaactctggaaggtctattccacagaccttccagcgcgcccaaaggtttacttcaaattgccactcaggaactgctgcaagcgctcgctcttcggattgcccagcacgtcctcaggcgcgccttgttcctccaccaggccctgatgcaggaacagcacctggctcgacaccttgcgtgcaaagctcatctcgtgggtcaccatgatcatggtgcggccttcctcggccaggccttggatgaccttcaatacttcacccaccaattccgggtcgagggccgaggtgggttcgtcgaatagcatgacctccggttccatcgccagggcgcgggcgatggcgacgcgttgctgctggccgccggacaggaacgcggggtattgatcggccacgcgcgccggcaaacccaccttgtccaggtagcgacgggcgcggtcttcggcgtcctttttgctgcaacccagcacccggcgcggggccatggtgatgttttccagcacgctcatgtggctccacaggttgaagtgctggaagaccatggccaggcgcgtgcgcaagcgctgcagttcggcgtcatcggccacgcgcatgccgtggcggtcactgaccatgcggatcggctggccgtcgagggtcatggcgccgtcgttgggcgtttccaggaagttgatacagcgcaagaaggtgctcttgcccgagccgctggcgccgatcaggctgatcacgtcgccggtcttggccttgagcgaaacacctttgagcacctcattgtcgccatagcttttatgcaggccttcaacggtcaatttgtacatggggcatgcatcctcaaggcgaaagtagatagccgctgcggtaggcctcggtgccagcgacatggccgatgaccatcccggcagtggccatgcggcgcagcgaacgtgcgtaaagcaggccggccttttggcagtgcacgggcgttacgcggtcggaaatggggtcgatgatttcggcgatcagttgcccggcttccaggtattcacccggcagggcgctgaacaccagcaggccgcccaccggggtcgccaccggttcaacgccggccagcggcgtggccgggtagggcaggtcgggcagcggtgcggcatcgcctgcaatggcgccgaagtgaatcaggtaatcgatgatcgcctggcagtcgaggctcgccaggccatggttgacgtcaccctggccgcgcagctcgacggtgaccgaaaagctgcccatggggatcgggaaacgctcgccgaaacgttgctgcaactgccaccacaccagggtgaaacactcatcgaaggattgcccgccggaatcggtcgcgagcaaattggcctccgaaccgatatagcgcgccaacggctccacctgcggccaggcctcgggggtggtgtacaggtgcgccaccgcttcgaagtcgcagtgcaggtccagcaccatatcggcatcgcaggccaggcgttgcagcaccaggcgttgggattgcagttgggtctcggcacgctgcgcggcgagggtggaggacagcgcggagcgcaccagctcgacgtttcgccggggatcgtcccccagccgttcctcgatctggtcacccaccgcttcactgaggtcgacaaacaggcgattaaagttttgcccgctctccagctcgtagcggcccagcgggatatccatcaacacctgctccaggcccaccggattggcgatgggcaccagcacgatctcgctgcgcaggcgcccggctgctgccaactctgccaggcggagcttgaggtgccaggccaccagcatgcccggcagctcatcggcatgcagcgatgactgaatgtagatcttgccctcggcctgttccgggccgaagtgaaaactgtgaatctgccgcgccgtgcctggcaccggcgcgatcagctcatggacgtgatgccgcatgaatgctcctgaaaatgaaaagctgcttaatggctcggcccgaggaaagccagccagcggcgctctgccagacgaaacagaccgaccagggcaaaggtcacggtcaggtagatcagcgcagcgataccgaatgattgaaaggtcatgaaggtagccgagttggcatcccgcgccactttgaggatgtccgggatcgtcgcggtgaaggccaccgtggtcgagtgcagcatcaggatcacttcattgctgtagtagggcagcgaacgacgcaacgccgacggcatgatcacataggcgtacaacttccagccgctcaagccgtaggccttggccgcctcgacttcaccatgggccatgctgcggatcgccccggcgaagatctccgtggtgtaggcacaggtgttgagagcaaacgccaggatggtgcagttcatcgcatcgcggaaaaacgcatccagcaacggctgctcgcgcacggcggcgatgctgtagatgccggtgtagcagatcagcaactggatatagagcggcgtgccccgaaacaggtaggtgtagaactgcaccggccagcgcaccaggcgcttgcgcgacacacgggcgatggacagcgggatcgacaccagaaagccgatgaccagggctgcggtgagcagccacatcgtcatggccagccccgtgatgtgctggccgtcgctataaaggaaggggcgccagtattcctgcaagagttcgatcatcgtacggcctcccgggcgccggcggagtagcgacgttcaaggcggcgcaggacaaagttggacgcgctggtgatcaacaggtagatcagcgcggcgagtacgaggaaatagaacagctggtaagtgctcttgccggcgtcctgggccgccttgaccaggtcggccaggccgatgatcgacaccagggccgtggccttgagcatcaccatccagttattgccgatacccggcaaggcaaagcgcatcatctgcgggaaggtcacgtagcgaaaccgctggccgcgcttgagtccataagccgtggcggcttccagttggccgcgcggcaccgcgaggatcgcgccacgaaaggtctcggtgaagtacgcaccgtagataaagcccagggtgatcaccccggcgctgaatgggtcgatctcgatgtattcccattccatgaagtcggtgaggccggtcaaccaggtttgcaggctgtagaaaatcagcagcatcagcaccaggtcgggcactccgcggatcagcgtggtgtagagctgggcggggatgcgcaggaagggcaggctggacagtttggcgctggcgccaatcagccccagcaatacgctgacggccagcgacagcaccgacaacttgatcgtcatccaggtgccttgcagcaacagcgggccgaaacccttcaggctgagcgcgctcaacccgagggtttgcaacaattcttcgaacataaatcaggacctatggcgataaaaaagcgcccctccaggggaagggcgctccaggcattatttgccgctgtacaggttcagatcgccaaagtgtttcttctggatggtggcgtaggtgccatcatcgtgtaacgctttgatacctttatccaaaagcgccttcagctcagtgttaccttttttgataccgacggcggttttcgacggcagcaatgggtcgtcgatggccgcgctgacttcataaccggcgcctgccggcgacttcaggaagcccagttcggcttgcagcatgtcctgcacggatgcgtcgagacgcccggaggtcaggtcggcatacacttggtcctggttggcgtaggccttggtggtcacaccggctttatccagtacggccttggcgtaggcttcctggatggtgccttgctcgtagcccacggatttgcccttgagggactcaggcgtcgagtagccagcacctttcttgaacaccagcgaggtcgggccggagaacagttcgctggagaagtcgatggccttttcacgcaccggggtcacggtcatggacgaaatcacgccgtcgaacttgttggccttgaggcccggaatcatgccgtcgaaatcactttctacccacttgcactttactttcagctcggcgcagatcgcattgcccaagtcgatatcgaagcccaccaggctgccgtcggcggccttggattcgaatggcgcgtaggacggatcgacaccaaaacgcagttccttgtattccttggccgtggctacacccgcggccatgcacagagccagtgcagaaagggtcagcaatgcttttttcattatgtaatccctggaaaccaagataagcgcttgtggcgcgtttaggactgttactgaacggtgtcagacggatcacaagtagcaatttctgcaccatagttccgaatgtagttccgaatgagcgttttaaaaggtgggatgagggagatctgagtgtaggagatgcccgaaaatgggcgctgaaaaatgagcgcaccatttcgggtcataaagaaatttaaatgtgggaggtgtcaggtaagcaggtcttgcagggtggcaaggctgtcggcctcatccaccgccttgtcctgccgccagcgcaacatccgcggaaaccgcacggcaattccgctcttgtgccgcttggacaaggcaataccctcgaatcccagctcgaacaccatgctcggtgtcacactgctcaccgggccgaatttttccacggtggtcttgcgcacaatcgcgtcgaccttacgcatttcttcgtcggtcaggccggagtaggccttggcaaacggcaccagcgtgcgttcgctgccggccgggccgtcccacaccgcaaaggtgtagtcgctgtagaggctggcgcggcggccgtggcctcgctgggcgtagatcaacaccgcgtcgacgctgaacgggtcgaccttccacttccaccacacgcccatgtccttggtacggcccacgccgtagaggccatcgcgggccttgagcatcatgccttccacgcccaggctgcgcgaggcttcacgctgttcagccagcgcttcccaggtggttgcggtcagcaacggtgaggcgagcaatactggttggttgcactgggtgaccacctgctcaagctgggcgcggcgctcggcctgggtgtggttgcgccagtcgtcgccccgatgttccagcaggtcgtaggcgaggaccgcgaccggcgcatcctccagcactttcttgctcaacgtcttgcggccaatccgttgctgcaacagggcgaagggttgcaccgcgtccttccacaccacgatctcaccgtcgatcaccgtgccgtccggtaacccactcaccaggctgtgaagttcgggaaaacgctcggtcaccagctcttcgccacgggaccatatccacaggcgcccatcgcgcttgaccagttgtgcgcggatgccgtcccacttccattccacctgccagtcggcgggagaaccgagcagcgcttcgaattgctccaccggttgcgccaagccatgagccagaaaaaacggataaggctggccgccccgttgtgcatgctcgtcggacgattcggcggcgatcagcttgaggtagccctcagcggttggacgattggacaggtcggtgtagcccactaaccgctgcgccacacgcttgctgtcgaggtcggccatggcggcgagggcacgggtgaccaacaacttggatacgcccacgcgaaaactgccggtgatcaacttgatgcacaccatcaggctcggttgatcgagttgcgcccacaacgccggcaggcgctcagccaattccaggggaggcaagccgcgcaacggcaggagtttttcctccagccacacggccaggccatcctccgaggtgtaggcagattccggtagcagcagggaaatggtctccgccaggtcacccaccgactgatagctttcctcgaacagccacggctcgatgccggacgctgcggtggccatgtcccgcaacaggcgggtcggcaccaattgccgtggccgtccgccggacaggaaatacacggcccaggcggcatcttctggcgcggccccccggaagtaggcttgcaacgcggccagcttggcgttgctggaggtggtggcgtcgagattggcgtacagctcggcaaaggccttcatgcgccggcctcttcttcgtcatcgccgtattcggtggtgaagccctgggcatccaggcctttttcccgcaggtggcgcaccaatacgccgacagaaccgtgggtgaccatcacccgctcggcgccggtctgctcgatggcccacaacagtccgggccaatcggcgtggtccgagagcacaaagccccggtccaccccgcgccggcggcgggtgccgcgcaggcgcatccagccactggcgaaggcgtcgctatagtcgccgaagcgcttgatccaactgctaccgccagcggagggcggggcgatgatcagcgcttggcgtagcaacgggtcggtcttgttgaagtcgccggcgtagagggtttcagggatatggatgccggcctcgcggtacacccggttcaacggttcgaccgcgccatggctgaggatcgggccgatgctggcgtcgatgccatgcaggatgcgctgggccttgccgaacgagtaacagaacaacacgctggctttgccgacggcgatgttcgcctgccaccagtcgttgatcccggcgaagatcagcgcctggggctgccagcggtagatcggcaggccgaaggtggattcggtgataaaggtgtggcaacgcaccggttcgaacggcgcgcaggtgccatcgggctcgaccttgtagtcgccggacgcgacccagacctcgccctggtactccaggcgcacctgagccgagccaagcacatgcccggccgggtgaaagctcagggtgacaccgtggtgcaccagtggctcgccgtaggccagggtttgcaggttgatgtcctggcccagcctggagcgcaggatgccttcgccgggggctgccgccaggtagtgctggttgccagtgcgggcgtggtcgccgtgggcgtgggtgatgaccgagcgctccaccgggcgccaggggtcgatgtagaaatctccggcggggcagtagaggccttcggggcgggcgatgacaaggtccatggggtgaccgggggaggtgggcttgttacttatgaggcggggctgagctgagaagttctatcggagtgcatgcagtccaaatgtgggaggggcggtgcgacgattcgacttgcccccgattgcggtgggtcagttgcaccttggctggctgatacaccgctatcgggggcaagccccctcccacattagatccaggtttttcatgaaaagccgggttatttaccgggtgtcagggtcaaccgggccttcccgtacaccttctcgaagttctgcggttgcatcgggaagctcaggtattgcgccttgagcgacgggtcgatgccattggcatagttcgggctggccgggttgccggattggccgatgccgccctgacccatcatcggctccacctggccgaaatcgacaatcaggcgcagcgccggcacctgggtggtggtgaagtcctggccccagctgtagggcgccgggttcaaggtgttgtggtcgccaccggaggccagcgggccacgaatcacctggccattggcgtttttccaggtggtggtgtgcagcttgccccactgccaggccttgtggtcggcgcccagctgactgtcgccggcgctgatcgcggcggccaggctgcgggcgaggatcgccggtttgtcttctttctgcggcgtacgcacgtcatcccagaacgggctgtcttcgcggcccagcaagtgatcggcctgggcggcataggacaggctggcgttgctgacaaaggctttccagctggcgctgttttccggccccagctcgtcgaggaagatctgtctggtgctctcctgcaggaacagttcgtagagcgccgcatcggcagaggtggacaccaggcgaccatcgaacgccatcaggcgccccagcgcctcacgggccttggcctgttccgccgcaggcagtgcgtcaatcgcctgtttcagcggctgggccatgcccggcgcctggaacatgctcttgagcttggcggcgaaggtggtggtttggtcgtactgcatggcgatcatgctgcggctgtcatgcttgccggcattggccagttgcgccaggcgctcgctgcgctccggggcgtcccaggagttggacagttgcatgccatagccacgcggcgcggtgcgctggttggcggtgccgatccagccttgggccggatcctggtcatagggatgcagcatcgcgtcggcgtagccatcccagtcaaaccgcgtgtcccagcccggcgacggcagcaagccttcgccttcgcggcggttagggaagcggccggtgacttgccagccaatgctgccggcgtcggcgaagatcatgttaagggcgatggcgcggatttcccgggtcgcatccgaggctttgccgatggtttgtgcgcgggacaggtcgaagaacgcatccaggctcttgtcgtccttgaagtcagcggtttgcagggccaggcccagaccggtggtcaacgcctgactgctattgagcagggcgccatgacgggtttcgtacaccacctcgcggatcgagcgttggcccttgatgaagaaggtttcgttacgcacgcctgccggcagccatttgccgttgttctcgtagtacagcgcgctgccctggcgcttgaccttctccaggaacaggtcctgggtgtcgcccttgaccgtgctcatgctccacgcgactttgccgttgaagccggacaacagtgtcggcaggccggcaatcgaagcgccggcggcctggtatttcggtgcacggatctgtacgtagctccacggcgacggtgcctgcggctgggcggcgaggtcgcctgccagcaggcttttaccgctgcggctgcgctgcggggcgatggcccagttgcttgaggtggtgactgccagggcgttgaggctgctcagttgctggctgaccgcgtccagcccggccaggccggtgatctgacccaggttcacacccttgagtttttcggcctcggccagtgggatcgcttcatccggcgcgctgggggtgagccaggcgagtttgtcgacgccgaccttctgcgccagcaccagcgacgaaatctcttcatgcaggttggccgattcgctgaaattcagcaggcagaacagcagcgccgaatcttccggcttccagtactcgggcttgtagccggtctgggccaggtccggcggcagcttgtcgcggtagcggaacaggtaggcgttgacgccgcgcgcatacacttcaaagaagcgcttgaggcgcgggctggaggcgttgtacagctcgccggcgcttttcttcaggttgaccgcgcgcatgaagcggtcgacatccagcacttcgggcccggacatttccgccagccggccctgggccagcaggcgcagggtgaccatctgggtgatgcgatcactggcgtgcacataaccgaggctgaacagcgcgtcgtggaaggtgttgctttcgatcaacggcatgccctgggcattgcggcgtaccgatacgttctgcgcgaggcctttgatcggctgtacgccggcaaccggcggcagggtgtcctgggtgctctggagctggcaaccggccaggcttaacgcactggccattgccgcggcaacgccgaaccggggaagaaaatgtgagagggctggcgaggccatggcaaagctcctgcggggggtagcgtcagtaaaggcgctacgttagtgagcgcggcgaaacgacgcaagcgggagccatgccttattttcaggaattgcgtatcaagacttgggcgggttcactttctgcaccagctcatacgcccgaaccgtcgccggccgttctttgatgctgttgaaccagcgctgcaggtgtgggaaatcttccaggcgctggctctgccatttgtgggaaacaatccacgggtagatcgccatgtcggcaatgctgtagtcctcaccggccacgaacgcacggtccgccaggcgccggtcgagcaccccgtaaaggcgtgcggtttcatccacatagcgtttgatcgcgtaggggattttctccggtgcgaattggctgaagtgatgattctgccccgccatcgggcccaagccgcccatctgccagaacagccattgcagcacttcctggcggccacgcaggtcgtttgcaatgaactgaccggttttttccgcgaggtacaacaggatcgcaccggactcaaacagggaaatcggtgcgccgccgtcggtcgggttctggtcgacgatggccgggatgcggttgttgggagcgatcttcaggaagtcaggcttgaactgttcgccctggccaatgttgatcgggtgcaccttgtagggcaggccggcttcttccaggaacaacgatattttgtggccgttgggggtggtccagtaatacaggtcgatcatgaagctctccaaaagtggtgatgcttgagcggatgcctgtaggtataggtaatgttgggcgtgcgaaaattcaatgaaacatttatgcatacccttagaagccaatcagaaagcgccatccaccaacacctgcaacgactgctcagaacaacgttcgatgcgcgcccgcacgcgatacacctcggcaaacaacagcgggttgagcacgtcgtttgccgcgccgctggcatacaagcgaccctggcgcagcacggcaatatggtcggcaaaacgtgcggcaaggttgatgtcgtgcaataccaccacggcgatcaggttgtgttcgcgcaccaggtcgcgtacgcactccatgactttcaattggtagttgaggtcgagggcgctggtgggttcgtccagcagcatcacttgggggcgccgtgcaatcagctgcgcgaggctgaccagttggcgttgaccgcccgacagcgtgcttaaccactgatcggccaggtgcgcgatgccaatgcgttgcaacgctgcaaaggcttcgcgcaggcaggcgtcgttggacaatggaatgccgtccacactggccacgcgcagcgcggcaattacactttccatcacgctgaggctcaggcccggtggcaggttctgcggcatgtaggtcacgcgccgggcgcgctcggccacggacatggccgacaggtcgagttcacccaggcttacgacgccttgcatcttttccagcccggccacggcgcgcagcaaggtggacttgccggcgccgttggggccgatcagggcggtcaggctgccgtggggcaaggtcggcaggctcaggtcatgcacgatctgcctgcggccataactcacattggcgttgtgtacgcttaacccttcgctcataactgcctcccgcgcttgaacaccagcaccacgaaaatcggcacgcccaccaacgcggtgacgatgcccaccggcacgatcacacccggcatgatcagcttgctggcaatcgacgacagcgccagcaacagcgcgccggtcagggcgctggccggcagcaggaagcgctggtcttcgcccaccaggatccgcgcgatatgcggacccaccaggccgataaagccgatggtgccgacgaaggccaccgcggtggccgacaacaggctgatgcgcaacaacgagaaaaagcgcaagcgtttcacgtccacgccgaagctttgcgcgcggtcttcgcccatgcgcagcaaggtcaggcgcggtgcggcggcgaaggaaaacggcagcaccaccgcgaccaccagcgccaggatgccgagcttgtcccagttggcccgggtcacgctgcccagggtccagaacaccagttgttgcagcacatcttcggtggccaccagttgcaacaaagccaccaccgcgttgcaactgaacaccagggcgatgccgaacagcaccaggctctccacaccggcgccccgtaggcgcgacatggcttgcagcaaaaataccgaggcggcggcgaagatgaacgccgagagggagatcgccgtgttggccgacacccacagggtcgtcaccgggaacacaatcaccagggatgcccccagtgccgccgccgacgacacgcccaaggtaaacgggctggccagtgggttgttcaagatcgcctgcatctcggcgccggccagcgacaacgcacagcccaccagtatcgccatcaacgcgtagggcaggcgcacgttccagatgatcacctggtcggtggcgctgaggtgggacgggtgcacaatcccgtcaagcaaggccagcaggcccatgccggacgggccgctggccaggtccaccagcagggcgcacaccagcgccgtgccgagcagcgccaatagccaggcacgccgcgcgagcaggcggcgatagccgtgggtggctgaggcgaggtcgagagtttgcgtggtcatttaggcgtgtcgacccaataggcaccctgcaacggcatccccaggaactgctggttgatctgctccatggtcgcctgcgggtccagcttggcgaactgttgcggatgcacccacttggccaacgattcaatcgccagcaggttgtacggcgagttgtagaagtcatgccacaggccgtgggcgttgcctgcgcggatggcacgcaggttggcgaactcggggcgcgccaatacgcggtcgaaggcttcacgcgcctcgtcatggctcacgccggcacccaggaccagtcccggtttgtggttgccggtggcgacatacacatccggatcggctttcaaggcgtactccacgctgatatcccccagtgcccccggcaccacatcggcggcgatgttgcgcccgcccaccagcttgatcacttcccccatgccgctcttgcccgtggtgtgccccggcgcttgccaggcgccggccagcagttcgaggaacacgctcggacgcgagccggccggcaaggtggcgaccgcgtcggtgataaccttgaggtgctggtcatagaagtccaggaaagccttggcctgggctgcgcgccccagcgcctggcccagcgcgttcatgctggtgtgggtgccttgcaccgggttgatgcgaaagtcgacgaacagcaccgggatgcccgccttggccagcacatcggcgaccgggctgtgttcggtcgggccgtggccggaaatgctgaacactgccaggtcgggtttgagcgagaggatttcctcggcgctgacgctttgttccgacgcctggccgatcagggggatgtctttgaccgtcggaaatttcgccacgtaggcgttataggtgtgctggtcgagcagcttcaaatcgttctgccaaccgacgatgcgctggaacggcgcatcgcggtccagcagggcaaacgccgaaatcaagcggccttcaccgagaaccacgcgcttgacgttgtccgccacctcgaccttgcggcccagcacatcggtgacttcatgggcggcagcggtctcggcatggccaagaaccaacgcggcgaacagtacgcccagcttgaacacattacggggtttcagcatggcagggactccaggtgaaggcggcgcatcaggtattgctccagcgccgcaaagggttgtgaggcagggatctcgatcagcacggttcagaactcgtagtcgacgctggcggtgagggtgcgcccggcgcccggaatgccgtagagctggaagccatcgagggacgcgccgacctggctgtaatagaacgtgttgaacacgttgttgaggttgaggttgaccgtggtgtccttgttcaccttgtattgcgcggccaggttgctcacccagtagccaggggctttttcgtggtcgcgggtgtagatcgcgtagaccccggacgggccgttggcgtagctgctgttgttgttcaaaccgccgacgtacttgttgtcggtgtagcggcgccggcccacttattgctcgccgtagctgaggctcagggcgtcggtgacggcgtaggtggtccacaggttggcggtcaggtccgggacgttcttggcttcggcgcctttgttgatgcctttggtctgggtgctcttgagggccgagaaaccgctgtaggcggtccagcgcggggtgatattgccttgcaggcccagctcgatgccgtcgacgcgtttggcgggcagggcgcgtaccggggcggattcgccgtcctggtattcccaggcgttgtccagttcggtgcggaagatcgccgccgtgacgttgagcctgtcgtgggcaatgtcccacttggtgcccagttcataggtcttggatttggccgggctgtaattgctggtgctggccgcgccgtagatctggttgttggtggacgcgcccagcgccgacggttgcgcggcctcgctgtaagacacgtagatactgccgttgggcaacggcttgaacaccgcgccgacccgaccgctgaccgcaccatcggtgctgctgatcgtcgcctggccgcgttggcgggtttcggcacgccagttgtcgtagcgcagcgagccgagcacttgccactgctcgttgagggtgatggtgtcgcccaggtagagaccggcgttgtcgatcaccgagcgcgggtcgccttcgcctttggtcacgtaggtgctggcgaagctgtggctggggtcgtgcatgtcaaacagcatgttgccggccggcacttcggcgttgcgtttcaggccgccgtaggtctcgtgatagaactccaggccgctgaccaccgcgtgctgcaggctgccggtggtgaggttgaaattgaagtcggtctggttgtccaggatggtgtagcgcttggacaaaccaaagtcgctgccgcgcaggatgccgtagccggtgttgctgttgttcacgtagtcggtgtaggcattcaccgtactgccgggcacttggctgatcgggcctacgccggtgtaacccaaggtcgcacagcgggtgccggtgcaggtcttctggccgttggcgttggcggcgaagaagcgcgccggcgagagcacggcgaagttgtcgctgcgttcccagcgcgtctggttgcgcaggttggcgtcgttccaggcgaagtcatgctcgaagcgcgccgtgagcgaggtggttttgttctcttgggtatagaggcgggagtcgccgtaccagttggagcgtttcacgcccggcatgcggtcgccgttggtaccgcgctggatcggtacaccgccgtccggggtgttggtgtctttctggtagaaggtgtcgatgaacaaccgcgtgtcggtgcccaggccgaagccgaacgaagtagcgatgccccagcggtcgtagtccacatcgtcgcgctcggccacctggttgtagtgcttcatcaggttgatacgcacggcagtggtgtcattcagctgtttattcaggtcggcagtgaggcggcgatagctatcggtgccgatcccggccgagactttgttggcatcgcccaggtgcgcttccttgctgaccaggttgacgctgccacccacggccgagactccggactcgatggagccggtgcccttgaacacttcggcctgttgcaggttgaaggtgtcggtgcgcgtggacatgccggcatcgcgcacaccgtcgacggtcaggctctgctcggaagaaaacccacggatcgaaaacagatcgccccagcccaggttgccctcgccggacataaaggtaatgccggggacattgcgcaacacttcctgcaaggtctgtgcgttctgctccttgagcacctgttgcggcacgatggttacgctttgcggtgcgtccagcagcggctggctgattttggccgaggtgacgcggtccaccttgaaggtggaagtggcttcgccgtcgacctggatttccggcaggttcaacaccgaatcgccggacgtggcggttggggcgtcagccagggcaaccggtgcgacgccgccggccgccagcaaaccgaacatcggggccagggtggtgtgcagcgtgtggcggtgaggcgtgggcaaggataggggcaatgacatggtaacgtccgagtctaaattacaattactctcatttaggttcggtagtctaaagagcgattccgcctgccataccccgggtttgtatcgctgatgcgtgattagggtttcctacaacattccattacatttgcctgcgctgctggctgaactttcggctatttgctgcgtttcatcgtttttcggattgactgcccatggccaagcaagaccacctgctgatcgttgatgacgacccgcaaatccgccaactgctctgcgactacctgagcgacgccggcttccaggtgtccaccgccgccgatggcaaggaaatgcgccgccgcctggcgctgaatgtcatcgatctgatcgtgctcgacctgatgctgcccggcgaagacggcctgagcctgtgccgcgaactgcgggtgaactccaacacaccggtggtgatgctcaccgccaagggctcgttgatcgaccgtatcgtcggcctggaaatcggcgccgacgactacctgcccaaacccttcgacccgcgcgagctgctggtacggatcaaggtggtgctgcgccgggtgcagagttttcccgaccgcgcgcgcctggatgaagcgccgagcattcgttttgccggctggcagctcgacacacgggcgcggcaattgctgtcgccggagggcgtggtggtcagcctgggcaactcggattaccgcgtgctgcgcctgctgttgcagcaccccaaccgcccgttgagccgcgattttctgctcaaccacgtgttcgacaaggacagcacgccgttcgaccgctccatcgatgtgtgtgtcagccgcctgcgctcgcaactgccggcagggttgatcaagaccgtgcgcaacgagggctacatgctcactgccgatgacgtggtgctgcaatcgtgagactgctgccgcgttcgctgttcgggcggttggtgctgatcctggtcagcggcatgcttgcggcgcaggccctgaccagcagcatctggtacgaccggcgccacgggcaggtgctggaaattcccgcgcggttgatcgccacgcgcctggcggacgtggtgcgcctggtgcacagcgatccgcagcaggcagatgtgctgatcaaactgctcgacacgccgaacttccgcctgagcctcagtgatcaggccagcaacaccccgagcaccctgcacgacagcgaccgcccgaccgaacggctgatcaagaaggtgctgtcggaaaaaaccggttatgcccagagcctgatcctgttgcgcttggctttggtcgatggcgatgggcagaccgccgggctgtcgaccctgctcggctccaagccggtggtggggcaatttttgatcgacctgcgcctgcccgacggtcgttggttgcaggtggatgccagtgaggaacagggctggaccagcacctcaccgttggaccttttgttcgattacgtcatgcgcatttatttgctgcgggtgttggtgctggtgctgatcgctctggtggcggtgcgcctggccatccgcccgctcaatgcgctggccaaggcggccgaagcgctgggccgggacatccagcgtccgccattgtcggtggacggccccaccgaagtgcgccgcgccgcccaggcgttcaatgccatgcagcagcggctgatcgccaatattgccgagcgcacgcgatttcttgcggccatttcccacgacttgaggtcaccgatcacacggctgcgtctgcgcaccgagatgcttgaggacactcgcaccaaagagcgttttcgcagcgacctggaagaaatggagcacatggtctccagcacgttggattttgtgagcagcggcgaaatcaacgagacgcgacagaacatcgatatcaacgccttgctgcaaagcctgcaggcggacctacaggacgttggcgaacaggtggtgattgagggccgggcgaagcagccattgcccgggtatgcccgcagccttaaacgttgcgtgcagaacctgatggagaacgccgtgcggtatggccgtgatgtggtggtgcgggtcgaggacaaggcggacagcttgaagatcgtcatctgcgatcgagggccggggattccccaggaacagttggagcaagtaatggaaccgttctatcgggtggaaggttcgcgtaatgccgagaccggcgggtatggcttgggattgagcattgcccgcagcatcgccaaggcgcatggcgggcgattggaattgcgcaatcgggaaggcggaggccttgaggtggaactggtgtttcaacgcaaatcctgaatgtggaacgcaactgaatgtgggaggggcggtgcgacgattcgacttgcccccgattgctggctgtcaggcgctgaataggagactggtataccgctatcgggggcaagccccctcccacatttaaatcttcagcgtggctttacgccccgtggcacttcttgaatttcttctcgctgccgcacgggcaaggatcgttgcgacccacgtccttcagggcattgcgcaccggctcctggtgagcgtggccgcagttcgggccgtggacatggccgtggtcgtgatcatggtgatcgtgatcgtggttgcagtcaggaccatggacatggggttgctgagtcatcgatgtcgctccggaataaaatcgccggggattatctcgccattgtggttcacctgcacgtcataaccgatgaataatccggttttcagctcgccttcgaggcgatagggcacggggcggtcgggttttttcagcatctgcaccacatcgcggatctgcggccagaggttggtgcgcaccgacaccttgaaaaaggcatggccgcgtggcggcaccgtgagccattcgttggactcgccctcggtgagcacaaagtcatccagcgtcaccttgtagatcaggccccgcacggtcaggtcggcgtcgtcgcggttgtccacgcgaaagtacagcttgaatttctgctccagcagcttggcccgtaccacttcgacctttaccagggagacgtggggcggcggcgcgtcgtcttcgaaccacgacgcgcagccggtcaggccaagggttaacgccagcatcaagctgtagatccggagcatggcgtgagtcctgtggtggttagagatagctggaacaacacttcttgaatttttgcccactgccgcacaggcaggcatcgttgcgtccggccttcacttccacggtcgggtcgatgaagtaccagcgcccgtcattctgtacgaaagaagactgctcgcggtggctatgttcaccggtgctgtcatgccagcgcgcggtgaaggtcacgaacgcgtgttccggctggccgccgaacacctcggagctttctacttcaaggccgagccaggtgctctgggcactccaggccgcaatggcggcacggtccaggccgggctgttgcgcgggcagcgtggtggcaaccagatagtccaccaggccgagtacgtaggcgctgtagcgcgagcgcatcaacgcggttgcgcagggcgccgggtgcccggcgtgataatggccgcagcaggcatccagcaggttgccactgccgcaggggcaaatggatgtactcatcgggttaccaccaatactttccgaagttttccgggttcgcccagaagcgggcgttgagccagtccggcacttgtttatagtcaagcagatcgtaggtaaacagcgtcagaacctgctcgtcgcgctggaaacgctcgccggcctgcagggccagggagaagaagtcggtgtccttccagtcgcagtcacccaggtccaccagcaccgcaatgcggctggcattgaggttgcggatgccgccgagcagggtcaggccttgcggttttgacaggtgctccaggcagtccaccaccagcgccaggtcaaaacgctgcgccgccagctccgccgacagtgggccgggtggggcaagagcaacctgggtgtcggggtgtgctgcttgaaaagcttccagcgccgggaactggctggcgcccaacagcaacaggcgtttgggctggtgcaggtcgagcaaggcggccagggcctgctggggtgtacggtcagaaataccggcggtcatcagagatcctcacatcaggaccgtagagactagcgcggctgagcgtgcgggcctagagcgggcggtggcgaaaagtcctacgagggcgatgatcctcaatgaatacgggcgcgcggcgtagtggcgcagatgaaaagagccgtctttactccactcatcggcccccgccgatcccctcaggagaaactcaatgagcatcatgcggacagctctacccttggttctgctaaccggagtattgacaggttgcgcaggtttgcaaaaaaccgattggcccacctgtgccgccgttggcggtgtgaccggtgcggcgatcggtgccactgaaagctcggcctatgcgggctacggcgcgttgttggtcggcggtatggccggcgcctattgctgggtgcatggcgacggtgacgaggacggcgacggtgtgccggacagccgtgacaaatgcccaggcacgccaaaaggcgtgcaggtggatgccaatggctgcccacccgcgccgccgccggctgtggttgaggaagtggtggtggtcaaggaagaaaccattgtgatccgtgacgtgcacttccagttcgactcagccatgttgacggcggcggataccgccaagctggacaccgtcgctacccgcctgaaacaggaagccccaggcgctcaactacgggtcagcggtcacaccgacagcgtcggtaaagacgcctacaaccagaaactctcggaaagacgcgcgcattcggtggtcgagtacctgatcaagtccggtgtgccgcgcagcagctttgtatcggtgaccggtgcaggcgagagccatccggtagccgacaacaaaaccgctgaaggccgtgccttgaaccgtcgtacggaaatccagatcaaccgctgacggcccttgcccctgtggaatcccacaggggcaatactgccgatcctcccctttattaacttttttgatccttcactggcaaagcgcctgcggaagtcgttactgtgcgtccaaagaaaaactagaaatattttttgaaaaaattcaggggagctccatgatgcgtaaggtttttctgttggccctgttggtcagccccgttgccctggcccagagcgtcagtgttgaacccaactcgttgatgcgcctgcccaacagcaccagcgtgttgcaattggagcgcctggaggtggcggactacggcaccttgctgatccccgccaacatcagccaggtcagcgtggatgagttgcgcctgggccgcgacgcccgtatcgccattgttcccggcaacaccgcgctgcaattgcaggtgcatcatgcgcagttggatcacggcagccagatcacctcccgcggcgctcccggcacccacgaaaaaccagccaaggccgggcgtgacctgaccctgcgcatcaattccctggcggcagaagaactctcggtggatgcccgtggcggcgccggtgcccaaggttatgccgggctggacggtgccaatggcgtggatccgggttgcacctggggctcggccggtcgtggcgccaatggtgataacggcggcgatggcttgccgggggcgtcgggcgcgcaggtacgggtcgagttgccgcaggatttcccggctgaccatatcaaggtttgggtcgacggcggtcccggtgggttggccggtacggcgggcaagcctggcaagggcggccagtccaaaggctgcctggtgtatcgcgccgatggcggcgagaaaggccgtccaggcttggaagggcagccggggccggcagggcctgcggggactgtgaccatccagcggctttgaattgcttgctctgacgccatcgggggcaagccccctcccacaattggaatgcattccaactgtgggagggggcttgcccccgatggcgatatatctatcgcctcagaacatcggccgagccgaagcaatcgccaccaccaccaaccctacaatcaagttgatccccaccaaccggcgaatctgccccagcgctgctgcgcccgccggccaatcctcagccgccactgccttgcgcagttccggcaacttcagcgcctggatgcggataaacaacgccgtcatcaccagatacaggcccatcatcacctgcacataacgcggtgccgtctcaaacccgttgaagcgcaagtgcagcagaccaatgccgctgatcggcaaaaccgccacggcgatccacacccacacgaaaaaacgttgaaacacatttacccacagcttgagccgggcagggccttcaagtgccgccacagcggcggggcgcaggatcatccaggcgaaaaacataccgccgacccatatcagggcggccaatacatgcagggtgtaagcgaggctaaacgcggtcattgtggtactccgttctgcgcgggattcattagcggggtatgatagccgccgatccgaaccactgaaaatttatccagcgttttttgcgcccgactatccatgatcagcactgaactcaaaaccacgatccagggtgcctattcgcgttttctcgaagccaagagcttgaaaccgcgctacggccaacgcctgatgatcgccgaagtggccaaggtcctcggggatatcgacaccgacgacgaaggtcgccgcgagggtgagcccgcggtcgtggccgtcgaggccggtaccggtaccggcaagaccgtggcctacagcctggccgcgatcccgaccgccaaggccgccggcaagcgcctggtgattgccaccgccactgtcgccctgcaggagcagatcgtctacaaagacctgcccgacctgatgcgcaacagcggcctgaacttcaccttcgccctggccaaggggcgtggccgctacatgtgcctgtccaagctcgatgtgctgttgcaggaaggtcacgcgcaaactgccactgcccagctgttcgaagaagaaggcttcaagatcgaagtcgatgaggccagccagaagctgtttaccagcatgattgagaaactggccggcaataaatgggacggtgaccgcgacagctggcccaccgccctcgaagattccgactgggcacgcctgaccaccgaccacagccaatgcaccaaccgtcattgccccaacttcggccagtgcgccttctacaaggcccgcgaaggcatgggcaaggtcgatgtgatcgtcaccaaccacgacatggtgctggccgacctggccctgggcggcggtgcggtgttgccggacccgcgcgacaccctttatgtgtttgacgaaggccaccatctgcccgacaaggccatcggccatttcgcccattacacgcgcctgcgctccaccgccgactggctcgaaaccaccgcgaagaacctcaccaaattgctggcccagcacccgctgccgggcgacctgggcaagctgatcgaacaggtgccggagctggcgcgggagatcaagacccagcagcaattcatgttcagtgcctgcgagcaggtcgccgacttcaagcccggtgaggatgtggaggggcgtgagcgtccccgccatcgttttgtcggcggcctgatccccgagcatatgcgcgaaatgggcatcgagctgaagaagggcttttcacgcctgactgacctgttcacccgtctcacggatttgctcaaggaaggcatggacggcgaggtcaacatcggcatcgccagcaaccaggccgaggagtggtacccgctgttcggcagcctgctgtcccgttcccagggcaactgggagctgtggaccgccttcaccgtcgaagacccggaagacaacccgcccatggcgcgctggctgaccctgtcggaaagcggtgcgctgttcgatatcgaggtcaacgccagcccgatcctggccgccgaaatgctgcgccgcaacctgtggaacgtggcctatggctgcctggtgacctccgccacgctgaccgccctgggcaccttcgaccgcttccgcatgcgcgccggcctgccgaaaaaggctgtcaccgccgtggtgccaagcccgttccatcacgccgatgcgggcgtgctgcgggtgccggacctcaaggccgacccacgggacgcagcggcgcacaccgccgccatcatccgtgacctgccggagttggtcgaaggttcgcgcggaacgctggtgctgttctcgtcacgcaaacagatgcaggacgtgttcgatggcctcgaccgtgactggcgcaagcaagtgttcattcagggcaacctgtccaagcaggagaccctgaacaaacacaaggcgcgtgtagacggcggcgactccagcgtgctgttcggcctggccagcttcgccgaaggcgtggacttgccgggtgcctactgcgaacacgtggtgatcgccaagatcccgttctcggtgccggacgatccggtcgaggcggccctggccgagtggatcgaggcgcggggcggtaacccgttcatggagatctcggtgccggatgcttccttgaagttggtccaggcttgcggtcgcttgctgcgtaccgaagaggaccggggcaccatcaccttgctcgaccgccgtttggtcacccagcgttatggcaaggccatcctgaatgccttgccgccgttcaggcgcgaaatttcttaagccactgtgggcgttttcgcccacttcgtggtctatctcactgtatttcatcaggccattcatcggccgtctgggagaaccttgttcgtatgattcgcacgctgcccgccgtttttgccctgctgtttgccgcgcccttgatggccgcgcccgctgggcaacagactttgttcaacttcgtccggcctgccgatgtggtcaaggtggcgaccctggacgccagcctgccgcaatacaacgccgaacaaacccctgagggcgaagtgctgcgccgcatcacattcaacccggccgccgaaccgagcctggtgctgagcccgcagaccggcacctgggactggtcccagtcgggtgccatgagcctgcgtatccagagtgcgatggactgggcattgaccctctacgtcaaggtgcagagcgcggatggcaagaccctggtcagccgcatcgacctgccggccggcccggcccagaccttgctggttcctctgcaggccaactcgccgctgagccagggcatgaaggccggcccaccgatgccgatcactgtggacggccagcgtgtgctgctggccagcagtgcaggcgaaatcgaccgcagccaggtggtgtcggtgacggtgtcgatgctcaagcccaatgccgcccaaagcatcctgctggagcgctttggcgtgcaggacagcgagccggtgctgaaggcggcctacagcgagctggtggacgcctatggtcaatccacccgtgcgcggtggccggaaaaggtcagcagtgacgaacaactcaaggccgccgccgccaaggagcaacagcagctccagggctggctggccacgcgggataaatccgctttggatcaatacggcggctggaacaaaggcccggcattcgatgccagcgggtttttccgtaccgagaagcgcgatgggcgctggtacctggtgacgccggaagggcatccgttctactccctgggcgtcaataccgtggccccggacaacagccagacctatgtggccggccgtgagtggatgttcgccgcgctgcccaagggcggcgaaccgttcgataagtactacggcagcggcgacaaccgcagcggtaacggcgcgggggaaggccgtggctttggtgccgggcgttggtatgacttttacggcgccaacttgcagcgcacctatggcggtgatggcttcgaccagaaacgctgggtcactcacaccctcgatcgcttgcaggcctggggtttcaacaccgtcggcaattggagcgacgagagtctggccaccgctgaccgggttccctacactttgccgctgtcgatcgtcggcgattacgccagcatcagcaccggcactgactggtggggcggcatgcccgacccgttcgacccgcgcttcgccatggccaccgagcgcgccgtggcgattgccgcccgtgaccaccgcgatgacccgtggttgatcggcttttttgccgacaacgagctggcctgggccggccccggcgatgatccgaaatcccgctacgccttggcgtacggcacgctgcgcatgaccaccgacgtgccggccaagcgcgcgttcctcaagcaactgcgcgacaagtaccgcaacgaagaaggtttgtcgaaagcctggggcatcgagttgaagggctgggagctgatggaggacccgggcttcgaaccgccgatgccgaatcccgagcacccggaaatcgaggcggacttcaaatacttccagaagaccttcgccgatgcctacttcaagaccatttccgactcgttgaaatggcatgcgccccatcaactgctgctgggcggccgttatgcggtcagcacgccggaagccgtggcctcctgtgcgcaatattgcgatgtgttgagtttcaatatgtataccctcaaaccccaggacggttacgacttcgccgcgttgcgggcgttggacaagccggtgctgatcaccgaattcaacttcggctcggccgaccgtgggccgttctggggcggcgtgacgcagttggccagggaagaagatcgcggcgcggcgtatgccaacttcctcaagcaggccatggccgagccgtcgattgtcggcgtgcactggttccagtacctggaccagccggtgaccgggcgtctgctggacggtgagaatggccactttggcctggtcgggattaccgacgtaccgttccagggttttgtcgacagcgtgcgcaaaagcaacctggcagccgtcgaccaactgggcaaggaggcgcaaaaggccaaagcggcaggcgccgtgcgtgaaagcgaaggtggcagggccgggcatgaaggcaaaggcccggggcagggcgccgggcatgcaggcgggcactccgggaatggtcattgattgagcgctgacgggttcacaaaacccaccagggctggaacaatgtcggccacttttttcgatgttttccgagggcgctcaggtgcagatccagggtcattacgaactccagttcgaagcggtacgggaagcgttcgccgcgttgttcgatgacccgcaggagcgtggtgccgggctctgcatccagatcggcggcgaaacggtcgtcgacctgtgggccggcaccgccgacaaggacggcgccgaggcctggcacagcgacaccatcgtcaacctgttctcctgtaccaagaccttcaccgccgtcacagccctgcaattggtggccgaaggcaaattgcaactggatgcgccggtcgccaatgactggccggaattcgccgccgctgggaaagaagccatcaccctgcgccagttgctgtgccaccaggccgggttgccggcgatccgcgagatgctacccaccgaagccctgtacgactggcaattgatggtcgataccctggcggcagaagccccttggtggacgccgggccagggccatggctacgaggcgatcacctacggctggctggtcggtgaattgctgcggcgtgccgatggtcgcgggccgggagagtccatcgtggcgcgggtcgcacggccattgggcttggacttccatgtgggcctggcggacgaagagttttatcgcgtggcccatatagcgcgcagcaaaggcaatatgggcgatgaagccgcgcaacgtttactgcaagtaatgatgcgcgaaccgacggccatgaccacccgtgcatttgccaatccaccgtctattctgaccagcactaataaacccgaatggcgccgtatgcagcagccggcggcaaatggtcacggcaatgcgcgcagcctggcgggtttttatagtggattgttggacggtagtttgctggaggccgacatgctcgaacaattgacccgcgagcacagcatcggcccggataaaacattattgacacaaacccgtttcggcctcggctgcatgttggatcagccgcagttggccaatgccaccttcggccttggcccacgtgcgttcgggcatccgggcgctggcggttcggtggggtttgccgatcctgaacatgatgtagcgttcggtttcgtgactaatacactcggaccttatgtacttatggacccgcgggcacagaagttggtcagaatattggccggttgtctgtaaaccccttgctgtttcacgtttttttgttacaaaggcaactataagaagacgctgtaggaatagtcgtaactttattcatctacaagcgtctgtttaacggatcatttagatccctggttttttctcattttgtggatatctcatgttatcgaacaagtccttggctcttgcgctatgcctcactattaccggttgcgcacaaactccacaaaatgatgccgagggcgggcattggtggtcatttggatccgataaggccacgaccaaggacgcagtgacccaagccgatgccaagccggaggctaaaccggacgccaagccggctgccggcgccaagcctgccgcaccggtagccgctgcggctgctgcgccaaccccggctccagccgccaaggctgacaccggttccagctggtggccattctcttccaagaccgccgacgaaaaggctgccgatgccaaggccgacctgaaagccgacctcaaggccgcagaacctgcaccagcggttgccaagaccgacaccgaaacccattggtggtggccgttcgaaagcaaacccaaaccattggccaaggtcgacgtgaccaacgtgccgatgcccgacccgaaaatcacccaagcctggctggacgactatgagccgcgtctgcgcgcggccatcaaggacagcaacctgcaactcgagcgtcgcgataacgtccttgtggtgattgccccggttgatggttcctacaacccgaaacgcccggccatgctgctgccggtcaccctcggtccgttcacccgggttgccaaggcggttgaagccgatccgaagactgccgtgctggtactgggccacgtcgatgccaccggcaccgccccggccagccaggcgctgaccaaggagcgtgcacagtccatcgcctcgatcttcagcctcagcggcttgaagcaagaccgtctgatgctgcgcggcatgggcgacctgatgccacgtgcggccaacgacagcagccagggccgcgccctgaaccgtcgcatggaaatcatgttcacccagcgcaccaccatgctggcgctgctgagcaagtatcagtcgggtaaaaccccgcctgtcgccgaaatggttgcggtgcaggacgttccagccccggctccagccgccaaggccccggccaagaaagcttcgaccgccaagaaagcggctgccaagccagcggccaagaaagccccggccaagccagcggcgaaaaaagcggcacccgccaaagccaaggccgctgcaccggcaaacgaccaggcgaaaaactgatccgctgaaccagaaggataaagctgcatgacccaggcactggccgatatgcgccgtgactacacacgggatggcttgagcgaggcccaggccccgagcgagccgtttgccttgttccaccagtggtttgccgacgcggtgaaaaccgagcagccaccggtggaggccaatgccatgaccttggccacggccgaccaggacggtcgcccgcactgccgcatcctgttgctcaagggcctggatgcgcagggctttaccttcttcaccaattatcagagcgccaagggccaacagcttgcggcgcggccgtttgcagccatgacgtttttctggccgaccctggagcgccaagtgcgcattgagggtcgggtggtgaaggtcacgcctgaagagtcggatgcttattaccaggttcgtcccttgggcagccgcctgggggcatgggcgtctccgcaaagccaggtcatccgtgaccgggaagagctgcaggacctgctcaaggctaccgagcagcgtttcagcgatacccagcctgactgcccggagcactggggtggctatcgcctgttacccgaacgcatcgagttctggcagggccgtgccagccgcttgcatgaccgcctgaactatcgcctgcaaggggccgactggacccgcgaacgcctggcaccctgagctgcacctttcgtcactccgcttgaatgatgcctgtcaccccgacgtctctattgaagaggcgtcgggcgtgtactgctgcgccgcggtcttcagccagtgaggcaagtcggaccgtttgattttcaagctgcgagccttttccagctgttgcagcatgaaggtgcacttgtgcaggtcattacctgccagcgacagggccaggtcacggtctatccaacgtctgatgcgcaggtacaaccagccatggaaatacagtcccgcaagggttgtgactacaatgatgaagtaatccatgaagatcccggttgagagaacagcgctaccgttcgtctgtttttctggtgtgggcagtctgtactaaggctgaatgaaagcaattttctgcggtgcttgccgtgacaggcgtcaagctgcagcgtttaatgaccacctgtcctttggagttgatgctatgcgtaagtctgttttactggttgcctgctttaccaccctgtctttgctgctgggtggctgcgcctcgagtctgaccggcgactcgtactcccgtgacgaggcgcgtcgtgtccagaccgtgcgcatgggtaccatcgaatccctgcgtccggtgaaaatcgaaggcaccaagaccccaatcggcggcgctgcaggtgcagtcatcggcggtgttggcggcagtgccatcggcggtggccgtggcagcatcgtgaccgccgtgatcggcgccgtcgccggcggcctgctgggctctgccaccgaagaaggcctgacccgcacccagggtgtggaaatcactgtccgcgaagacgacggcagcatgcgtgcctacgtgcaggctgtgcaggaaaatgaaatcttccgcatcggcgaccgcgtacgcatcatgaccgttgacggtaccagccgcgttactcgctaaacgtcgggtgtagaaatacaaaaccccaaccgggtgactggttggggtttttggttttcgaggctgtcaaattcaaacctgaggtgcggcctttttacgactcgccattgccgtcaccgcatacccaatacacgccgccaatatcgacccggtcaaaatccccatccggtcttccccggcaaactcactggcccccggtacgaatgccagcgagccaacgaacaggctcatggtaaagccgataccgcacaggatcgccacgccaaacacctggccccagttcgccccgctgggcagggcggccaggccagtcttgatggccagccaggtaaggccgaacacaccgatggtcttgccgatcagcaggcccgcggcgatacccatgggcacgtggtgggtgaagctttccaggctcacgccggtcagggacacgccagcgttggcaaaagcgaacaacggcaggatgccgtaagccacccacgggtgcagggcatgctccagcgtgagcagcggcgagggctcggcgtttttggtgcgcatcgggatgcagaacgccaatgtcacaccggccagcgtcgcgtgtacgccgctcttgagcacgcatacccacaggatcagcccgacgatcaggtacggcccgagcttgatcacgcccaggcggttcatcgcgatcaacgcaatcaggcaggcgcccgcacccgccagggcggcaccggacaaatcggcggaatagaacacggcaatcacgatgattgcaccgaggtcgtcaatgatcgccagggtcatcaggaacagcttcagcgacaccggcacgcgcttgcccagcagggccagcacgccgagggcgaaggcaatgtcggtggccatgggaatcgcccagccggaaagcgccgcagggtagtccttgttgatcgcccagtagatcagcgccggcaccaccatgccgccgatggcggctgcgccgggcagtaccacttgcgagggcttggacaggtggccgtcgagcagctcgcgcttgacctccaggccgatcagcaggaagaacagggccatcaggccatcgttgatccacagcagggcgggcttggcaattttcagcgcgccgatctgcgccaccaccggtacatcgagaaacgcgctgtacaggtgcgacaaaggtgaattgttgatgatcagcgccaaggccgcagccgcgatcaacaacagaccgctggcggcttccagctggaagaaacgggtgaaagtgctacgcagaggcaagggatgctctccaatccaggttcaataggtgggtaccctaacccgtaccgttagttgttaaaacaaaagttatattcttatttgttataagaggctggctggggtgatgttgcggctaagcctagcaattgtgtgtccgattgcgtcggtactgtatctgtgtggtctgtaggaaaccccctaaaatcagggctgacaccttcagagaaactctccatgagcgaccaccgtccctgggcccgcgaagccattcgtatcattgaagcagacttccagcgcagcgccgacacgcacctgattcccttgccgctaccaggcttgccaggcatcgagttgtacttcaaggacgagtccagccatcccaccggcagcctgaagcatcggctggcccgctcgttgttcctgtacgcattgtgtaatggctggctcaaacctggcgcgccggtgatcgaagcgtccagcggctcgacggcgatttccgaggcctactttgcccgactgctgggtttgccgtttattgcggtaatgccggctaccacgtcccaggaaaaaatcgcacagattgccttctacggcggcaagagccacctggtacaggatccgacgcagatctacgccgaatcagaacgcctggcgcgagaaagcggtggtcatttcatggaccagttcacctacgccgaacgcgccactgactggcgggcgaacaacaacatcgccgagtcgatcttccagcagatgcgtttcgagcagcatccggagccgagttggctgatctccagccctggcaccggcggcaccaccgccaccctcggtcgttatgtgcgctatcgccagcattgcacccgcgtgttgtgtgccgatgccgagcgttcggtgttctttgatttctaccagagtggtgatgccagcttgcgtctggactgtggttcgcggattgaaggcattggccgaccacgggtcgaggcgtcgtttttgcccaaggtcatcgatgcgatggtcaaggtgccggacgcgctgtcgttggcggccatgcattacctggctgaacggctgggacgacgggttggtggttccagcgggactaacctgattggcgccctggtggcggcgcagcagatgaaggcggcaggagagtcgggatcgatcgtggcgattttgtgtgatggaggtgagcggtatgccacaacctattacgaccaggcctggctggcggggcagggctatgcgttggacggtttgattgcggctgttgcagccagtgtcgaacagggcgagccgttgccggacagcatcctgcgcgcaaacatttaaccttgtaggagcccggcttgccggcgatggcgatcttgaagacgccatcgccggcaaggcaatgtgtcaggcttccaggcccaacatatcccgagccaacgcctcggcaatccgaatcccatccacgcccgccgacagaatcccaccggcataaccagcaccttcaccggcggggaacagtcctttcacgttcaaactctgcatcgattcgttccgggtgatccgcaacggtgatgaggtgcgcgtctcgatgcccgtcaacaccgcgtcgtgcaacgagtagcccttgatctgcttctcgaacgctggcaacgcttcacggatcgcttcgatggcgaagtccggcaaggccagggccaaatcgccaagagacacgcctggtttgtaggaaggctccacgctacccatcacggtggaaggcttgccggcgatgaaatcgcccaccaactgtgccggggcttcgtagttgctgccgccgaggatataggcgtgggactccaggcgttcctgcaactcgatacccgccaacgggccgcctgggtaatccacctctggggtgatgccgaccacgatgccggagttggcgttgcgctcgttgcgcgagtattggctcatgccgttggtgaccacgcggttcggctcggaagtcgccgccaccacggtgccgcctgggcacatgcagaagctgtagaccgagcggccgttcttggcatggtgcaccagcttgtagtcggcggcaccgagtttcgggtggccggcgtatttgcccaggcgcgcggcgtcgatcagtgattgcgggtgttcgatacggaaccctaccgagaacggtttggcttccatgtacacgccacgggagtggagcatgcggaacgtatcgcgggcactgtgccccagggccaggatcacgtgtttggagaggatctgctcgccgccatcgatgacgacaccgttcaactggccgtcttcgatcagcacatcggtcactcgttgctcgaagcgcacctcaccgcccagggcgatgatctgctcgcgcatgttttccaccacgccggtcaggcggaacgtaccgatatgcggtttgctgacgtagaggatttcttccggcgcaccggccttgacgaactcgtgcagcactttgcggccgtggaatttcgggtccttgatctggctgtacagcttgccgtcggaaaaggtcccggcgccgccttcaccgaactgcacgttggactcggggttgagcacgcttttgcgccacaggccccaggtgtccttggtgcgctggcgcacttccttgccacgctcgaggatgatcggcttgaagcccatctgggccagcaacagcccggcgaagatcccgcacgggccaaagccgacgacgatcgggcgttcggtcaggccttgcggtgcatggcctacgaccttgtagctgacatccggcgccgggttgacgttgcggtcatcggcaaacttgagcagcagggcggcttcgccctctacgttcaagtcgatggtgtagatgaagcacagctccgacgacttcttgcgcgcatcgtagctgcgtttgaacagggtgaaatcgagcaggtcatcactggcgatgcccaggcgctgcacgatggcaggccgcaggtcttcttcgggatggtcgatgggcagcttgagttcggtgattcgtaacatgacgggatccggtaggcggcgggcagagaggccggctgttttgcaaaccggcgattataagctccaatgaccgtttcccgtcatgttaaaacagcatggcgtcgcgtcagtcgtcgcgcgagccgccgaacgatgcgcaaccgcgctgtacctggccattgacgcgcaactcggcggtcatgtgctgcaaactgccactgaccgggtcgacacaacgctgcggcgctacccacaattccacgtgctgattgttggcctcggtcatcaggttgaagcggccgtcaccgatttgctcttccacataaggcacggccagtggcggctggccttcgcgatccagcaccaggcccttggcggtgacgttcatcacccaggtcggcttgtggccgttggcgcgcaggatcatgcgcttgaagtccgggtcgccgcaggccgaggtggagcgttcgacgcggtagagttgttgcaggtcgacgctgccctcggtgccgctggcaaccccggagaacttgccgcgcaggtcggcaaacaatgcgccttgctggccggccagggaggccgcttcctgcaggatgctggtgccaccggtgtcattgaccacatagttgcgtttgtcgttgcacggctggaacagcagtttgccgccgaccgcagtgagttcaccctgcatgcgggtcagcccggcgagcgacggcttggcaggatcactctcgaacatctggcaggcagcgaacagcggaagcagggcaaacaggaatagggtattggcggcacgcattatcgggtctccagacaagtgccgccacgttacgcaggccggcgctgcatcacaagcccatgacatagtttgacgcaggtctgcctgcggtcggatcaggaatattcgtacaggcgggtcgaggcatgtatgagagcgtcattttttcgataggagaaaggcgatgggctttcgacggtgtctctgtggttttttgctggtagcgagttctgcgctggctggcgagccggcgcgggtggagttttcgtccgccaccgattttgcggcaatcaccgttgacctcaagcaagacctggcgagcaacccgggcgttgtctgggtcgatgtagagttgagtccgcaggcgagggcgcgtctgaaggcgatctcgttgttgacgatcaaccaacgattgagcatttacgtcgacggccttgcgatgagtgcaacaccatctgtcgtcagaagtgttctggatgggttttacgtccgaatgggcgtccctcaagacttgttcatcaagtgggtgccttgggggcgccattagcggccgggaatcaacccacgataaacgtctgaccggtctgtaatccctccacacttttggcgtaggccaatgccacgtcggctccagcagccggtttgtagccacggaaatacggcgcgtagctgcccatggcctccaccagaaccgtcgggctgacggcgttgacgcgcaggccccgtggcagctcgatggcagcggctttgacgaacgcatccaatgcaccattgaccagtgcggccgaggcgccggtgcggatcgggtcgcggttgaggatgccgctggtgaaggtgaacgaagcaccatcgttggcgtactcacggccgatcagcagcagattgacctggcccatcagcttgtcacgcaagcccaactcgaaatcgctctcgctcatttcgcccaatgctacgaagtttacgctgcccgccgcacagaccagggcatcgaacttgccggtctgctcgaacagcttgcggatcgacgcgctgtcgctgatatccacctggaagtcaccgctgctgcggccgatgctgatcacctcgtgacgctgagccagttccgccttgaccgccgagccgacggtgccgctggcgccaatcaataggattttcatggtgctgttcctctaggggtaagtgaaggttcagtctagagtggctttttgcttggataaacgcactaataggcaacctttggttttcttttggaaacaatccatgagcgagatggatgacttggcggccttcgccgtgttgatcgaagccggcagttttaccgtcgccgccgagcaactgggctgtagcaaagggcaattgtccaagcgtatcagccagctggaagcgcggttctctgtggtgttgctgcatcgcaccacgcgcaagctcagcctgaccgcagccggtgcggccttgttgccccaggcccaggccctggtggtacaggtggatcgcgcccgtcaggcattggcccggctcaaggacgaccttgccgggccggtgcgtatgacggtgccggtgtccttgggggaaaccttttttgatgggctgctgctggagttttccaagcaatacccgcaggtgcagatcgagctggagcttaataacaactatcgagacctggcgcgagatgggttcgacctgggggtgcgctccggctccattgagaacgagcgcctggtggtcaagccgttgctggcctggcgtgagatgacctgcgccagcccggcttatcttgagcaacacggcgaaccggcgacgccagccgacctggccagtcatgcttgcctgctcaacagccactacagcggccgtgaagagtggttgtaccaccaacagcacgagttactgcgggtacgagtcagcggcacgtttgcctccaaccactacaacctgctcaaaaaagccgcgctggtgggggcgggtattgcacggttgccgtcctacgtgctgccggcggaattggcagatggccgactgcgttggctcctgcgcgattatcagacgcgcagcatgccgatgtacctggtgcatccttatcagggcggcttgccgcgtcgcacccaggtgttggccgactacctggtggattggttcaagcgcagcggcgaagccctggaccgcctttaacggtagcggcgagcgatcaggtgatcgatcgacaagcgacccgggcccttggcgaccagcaacagcaataacgcgagccaggtgccatgggttgggtaggcgtccgggtagacaaacaattgaatggtcagggtcatgccgaccagggccagggccgagaagcgcgtggcgaacccgacaaggatcagcaccgggaaaaagtgctcggcaaacgcagccaagtgcgctgcgacttccggcgatagcaacggcacatggtattcgctgcgaaacagcggtagcgtcgaggcggccaggcgcggttcaccgaattggaaggtgccgttgaccaggtctatggcaaagccttcgactttggtttgtccggatttccagaacaccgcggcaatcgaaaagcgtgcgagaaaggcgatcaggctgtagggaatttgctcgaaaagcgcgatgacctgattgatcaggcccgaagggcgagtgttcatggcgataccttttgttctggatgcaaatgagtaatggcgttgtggctgatcagcagcgccaggcattggtgcaggtcaaactcggcgccggcctcaagcgcgtgctccacggcgttttccaaggtcgcgccgcgggccaggttgttgatgaacgcgacagcatcaggggtgactgcgaataccttgacctccagaccctggcgcaacaccagggcactctgtggctgccagggatccaggttttccaggctcccctcggtctggtgtgccgcccacagcgctactactgcataggctgagtccagcgtggccagggaggggtgccattgcaggcgcagcccacccaggtccgtttgacttcgcagtgcctgtaatacggtctgttgatccaggggttggctgtctgccgcgtggtaggcctgtacccgcaagcgctccagccgggccatgtcggcgagataaggcacgctggctgccggttcgaacccctcgatgaagcaggcgaacgcgctaccgtacccgctcatcaatgggctggtgggcgggtgcgcctgtgcataaaggccggccatcgcgcggaaaaacgcatcgcccaccaactgcaacgtcacgggataagccgcagccaacgcgttgaccaatgagctgtgcacattgttgcggtacaccgcgaagcggctggctggctcggcgccattgctgctgaacaggccgtcggggcaaggcaggtccggtgccaacaaggccgcggtgaaggcgtcttgccggctcatggggtcacctgtgaaagatacctgtcagcttgccgggcctcggcttgcagcacgctgaacgcgggcaggtggttatcccgctcgatcagcgttgccactggaccgatgcgcgccagtaccgactcgtagagttgccacacggcgttatcgacaggggcgccgtggtcatcgatcagcaagcggtcgccaaggctgtcggtgtcttcggcaaaccccgccagatgaatctctgccaccgcgtgcaacggcaaggcatcgatgtaggactgcggatcacgttgatgattgatgcacgacacgtagacgttattcacgtccagcagcaagccacagccggtacggcggatgatttcgctgatgaagtcggtttcgtccagggtggagcactggaattgcaggtaggtcgacgggttttccagcagcatcggccgcctgagtgtgctttgcacctggtcgacgtgttcgcatacccgttgcagggtggcgtggtcgtaggccaggggcagtaggtcgttaaggaacaccgggccgtggctggaccaggccaggtgttcggaaaaggagtgaggttggtagcgctcgatcagtgccgccaaccgtgccaggtggtcacggtccggcggggcttcgccaccgatggacaagcccacaccgtgcaaggacagcgggtactgcgcgcggatcaaccccaggtaatgatgaaaagggccgccggccaccatgtagttttcggcgtgcacttcaaaaaaaccgatatcgggtgaggtctcaagcacttcaacgaagtgctcatgcttgagccccagtccggcccgaccgggaaggccgggcgcctgagcctgggagacggcttgcagggatgaaagagtcatcatcagtactcaggttttgcgagggatcaggatttagcggtgaaggccgcttcctggccgaaaccggtcggcgaggtggagcttggggttttgaggcaggtgccggcagggaccagtttccaggcgttggcctggtctttgactttcgaggtcccggcgcaggaagtgccggcgcccgcggcgcaatcgttcttgcccgcttcagcgacgccgaagcatttctgcatgtcgtcggcagcgtgggcggtggtggtcagagtggacaggctcagggcagaaccgagggccaggacgagggtagcggcagacagtttggtagtcattgtgtatctccagcagtgggttgagttggcgggcttgagtgcctgcttgtaccactagagacggcagggtggaatccgttacaagtcgatcaaaaataatttcaggcgacgcgaaacaaatatgggaggggcaagcccctcccacatttcagagccggttcgcctagccgccgaggtacgcctcacgcaccttcggatcggtcagcaactgctcgcccgtgccctgcatcaccacccggccgttttccagcacataggcgcggtcagcaatcttcaaggcctggttggcgttctgctccaccaggaacactgtcacaccgtccttgcgcagttgttcgatgatgtcgaagatctgctggatgatgatcggcgccaggcccagggaaggttcgtccagcagcaacagcttgggcttgctcatcagcgcccggccgatggcgagcatttgctgctcgccgccggacatagtgccgccgcgctggctgaagcgttccttgagccgagggaacaggtgcaacaccttgtccatctgctcctggtagtcgcccttgtcggtgaagaagccgcccatggcgaggttttcttcgaccgtcaggcgcgagaacacgcggcggccttccggcactaccgcaatgcttttacgcatgatgtgggacgactgctgccccaccagctcttcacccatgtagcggatgctgccgctatgggcctggggcgacccgcacaaggtcatcagcagggtcgatttgccggcaccgttggcaccgatcagcgtaacgatctcaccttggcgcacttccacgttgacgctgtgcagggcctggatcttgccgtagaaagtggaaacgttttcgaattgcagcattttacgcttcccccaaataggctttgatcacttcaggattgtcgcggatctgctccggtgtcccgtcggccagcggcgtgccctggttgatcactacgatgtggtcggaaatgctcatgaccagcttcatgtcgtgttcgatcaacagcaccgtggcgttgttttcttcacgcaacacgctgatcagcgccttgaggtcttcggtttccttggggttcaggccggcggccggttcgtcgagcatcaggatccgcgggcgggtcatcatgcagcgggcgatttccaggcgacgttgctgaccgtaggccagggtgccagcagggcggttggcaaactcggtgaggttgaccttgtccagccagtactcggcgtattccatggcctcgcgctcgctcttgcggaacgaaggggtcttgaacagtcccgcaaagaagttggtgttcaggtgacggtgctgggcgatcaacaggttctcgaccgccgtcatgtccttgaacaagcgcacgttctggaaggtccgtaccacgcccttgcgggcgatctcgtgaccggccaggccctggatcggctggccgtccagcaggatgctgccaccgctcggcttgtagaagccggtgaggcagttgaacaccgtagtcttgccggccccgttggggccgatcagcgcgactacttgtttctctttcacggtcagggccacgccgttgaccgccagcaacccgccgaagcgcatgctcaagttttcgactttcaggatctcgcggctcatttgcgcagctccatgtgtgggcgttgcatcgggagcaaaccttgaggacgccagatcatcatcagcaccatcatggcgccgaacatcaacatgcggtattcgctgaactcacgcatcatttccggcagcaggatcatcacgatcgccgccaggatcacgcccagttgcgagcccatgccccccagtaccacgatggcgaggatgatcgccgactcgataaaggtgaacgactccggggtcaccaggccttggcgcgcggcgaagaagctgccggcgaaaccggcgaacgcagcgcccagggtaaaggcggagagcttgatgatggtcgggttcaggcccagtgcgcggcaggcgatctcatcttcgcgcagcgcttcccacgcacggccgatgggcatgcgcagcaggcggttgatcacgaacagcgcggctaatgccagcagcagcgccaccaggtacaggaacaccactttgctcaccgggttgtagtcgatcccgaagtactcgtggaacgtctgcatgccttcagcggcggaacggtcgaacgacagcccgaagaacgtcggcttggggatgctgctgatgccgttggggccaccggtgatatcggtgaggttacgcaggaacaggcggatgatttcaccgaagcccagggtcacgatcgccaggtagtcgccgcgcaggcgcagcaccggaaagcccagcaggaagccgaacgtcgccgccgccatgccagccagtggcaggcagacccagaagctccagcccaggtaatgcgagagcagcgcataggtgtaggcacccacggcatagaagcccacgtaacccaggtcgagcaggccggccaggcccaccacgatgttcaggcccagacccagcaacacgtagatcaggatcagggtggcgatgtcgaccgcaccgcgcgagccgaagaacggccagatcaacgcggcgatgatcagggcaatgatgatgtagcgctgggtgcgcggcagggtcaggaattggctgaccttgggcgataccaacggaccacggttgctcttgagcaaggcattgaactgatcgctgaacaacacgcgcaggaacatcagcaccgaacacagggcgatgacggtcagggtcacgggacctgtgccatgcacttcaaggttgatgccgacaatgctcagcttgaggccgagtaccgggaaggccacggcccataccagcaaggcgctgaaaaacgccgatttaagatatctgctcatactttctcaacctccggacggcccaggatgccggtcggacggaacaacagcaccagaaccaacaggccgaacgccacgacgtccttgtattggtcaccgaagatatcggcgccaaaggcttcagccacccccagcaccaggccaccgagcatcgcgcccgggatactgccgatgccgcccaataccgccgcggtgaaagccttgaggcctaccaggaaaccggcgttggggttgatcacgccgtactgcatgctcagcagcaccgccgcgacggcggccagcgcagcaccgatcacgaaggtcagggcgatgatgttgttggtgttgatgcccaacaggttggccatcttgatgtcttcggcgcaggcccggcaggcacgccccagacgggagcgggagatgaacagggtcaggcccagcatcgccaccagggtgacgacgaagaccaggacctgcatgtacgaaatcagcacttcttgtgcgccgcctgggccgaaggagaagctccccggaatcaggttgggaatggacttgtccttggagtcctgggacagcagtacagtgttctgcaggaaaatcgacatgccgatggcggaaatcagcgggatcaaacggttgctgccacgcaagggacggtaggcaacgcgctcgatactgtagccataggcactggtcacgacgatcgacgcaaggaacgcagcggtcatcaacagcggcagggagtggatacccagcatggccagcccggcaagggcgatgaaggccacgtaggagccaatcatgtacacctcgccatgggcgaagttaatcattccaatgatgccgtaaaccattgtgtagccaatggctatcaaggcataggtgctgccaacggtcatgccgttaaccagcgtttggaaaaaatgatagatctcaggcattacagcgctcctaaaaacccgatacgcatttcactggtggagtcatgttccggccctgcactgtgttctgtgagcacatttgcacaaagcgtttgccagcgaaccgctggtgacggttttaagattttcaggtgagccagcgcccggatcgcgggtgtcaggcccataaacctcgtaaaacaaagcccactgctttcacagtgggcttgctggaccagtaatgcctggcttactgaggggaaacttcggtttttggtttaccgaagtgccattcgtagaccacgaacttgaagtccttcaggtcgcccttggcgtcgaagctcaggtcgccggttggggtcttgaaggtgcctgcgtggatggcagcagccactttggcggtgtcttcggacttcgcggcagcgataccgccggcgatgacttcaacagccgagtaggccgggaacacgaacggaccggttgggtcctgcttgttcttggtgaactcttcaacgatcgccttgttggctggatcggtgtcgaacgacttcggcagggtaaccagcaggccttcggaagcgccctgggcgatttgcgagatggagtcgttgccgacaccctctgggcccatgaacttggcgttcacgcctttttccttggcctggcgcaggatcaggcccagctcagggtggtagccgccgtagtagacgaagtcgacattggcttgcttgagcttctgaatgagcgagccgaagtctttgtcgccagcgttgatgccttcgaagagggcaactttcacgcctttcttctctagggtctgtttaacggcggtggcgatgccttcaccgtactgctgtttgtcgtgaatgacagcaacgacttttggcttcacgtggtcggcaatgtagttaccggccgcagggccttgggcgctgtccaggccgatggtgcggaagaccagtttgtaaccacgggaagtgatttccgggctggtggcagccggggtgatcatgatcacgccttcgtcttcatagatgtcggaggctggctgagtggagctggagcagaggtggccgaccacgaacttgacgccgtcgttgaccactttgttggccacggcaacggcttgtttaggatcgcaagcgtcgtcgtactccttggcttcaagcattttgccgtcgacgccgcccttggcgttgatgtcggcgatggcttgcttggcacccatgaattgcatgtcgccgtattgcgtcacaggaccggttttaggacctgcgataccgatcttgatggtgtcggctgcgaacgaatggccggcaaccccagccaggaccatagcggcaaacagtttggaaatctgcttagtagccttattcatagtgctccactcttactgttgtattttttatagttctagcggccttgtgagctgcagaaccggatcagatatctcggatatccccccggcagtgccctggcaactgtaccggtacagtgtagagcgccggttgatcgcttgaaaagctggctgctgggggcaaaacccgggtatgtcgcttaaatgaaagaaaaagacagaattgcggcggggtgatgccagagtttcgggcaatccttggctttcctgacactttcaatcgatgacgcatttgcaactgggtttttctgcctgacgctcgacgttatgattgcgccgattttttattcaggtgaactcccatgacgcaagaacctagcaccctctatgccaagctgctcggtgaaactgccgaaatttcctggaaggagcttgagccgttctttgccaagggtgccctattgtgggtcgatgcgggtctggatttgatcgaagcagccgaaggcatggccgaggataaccgcgacaaagtcgccgcttggctggctgcggggagccttggcgaagtgtctgcgacgcgggcattggacctggttgagcgtgatccaagtttgtgggcggtggtggtttcgccttggatactgatccaggaaagggcggcgtaaagaatgagcgcactaaaaaggtgcgcaattcaggctatcagaagtgtgtagcggagtaaccgccggcaccgtgatggcaccttgccgtagagaaaggtcacaggtgagggtgacgtaaacgtcacgggaacagttatacccgtggcacaagcgctgcaaaattgtttcccgatatgttcgcatccccctgcaggagccggtgatccggctcctgcaggcaggtcaggcggtcttgccagtgtggttgttcagcgagatcaccttggtcttgccaatccggtggcggtagatctcacgcaagtacttgatcgccttcttcacgcaatcccgtgacaggcgaatgtcattgatcgacacgaacttctccttgtcgttgatcaactcgcggtacttcttctcatacatcggcttgatcgcgtaccagttggtgtcgaggatcttcgccgggttctcgaactcgttgagcaactcgtcgatacggtcttcgtcgaagtcctcgtggatgatgaagtccaggatcgagttgtccagcgtgtcatcgaagcgatacgggttgcgcgcaaagcagcgtttgatgaaggctacgatcaacgtgaggaagtcatccgacaggcacgggctcttggcgatcagggtggtcagcgacaggttggccgaggcgccgatcaccagggcgtagcgcttgagcgtggtgttggggaacaggctgttgaggtgggtcttgagccggttcaagtccatgtaggacagcttgtagtccttgggcagtgacacaatcgagaccaccgacgagcagttcttgaagaagtgcaggtcatgcagcgcggcggcgtcgtagccagagttcttgtactgttccagggacgccttgtagcgcttggattcgatcggcaacaggctgatgccttcgatggcctgggtgaccttgttgaagtgcggcaggtcgatggaacggaagaacaggtcgtcgatgttcaggcgctgcggctctttctcgaacaccttgaatttgtcatttgacggcgccggggtttccgggaccacggactctgcgtaggcaatcgccactgggccggccaggctcatgaacaggtcgttggcatccaggcgaatggtttcgccgatgtcgatgccggcgcgccggaaatagttctggtcgtagtcggtggtcacggcctgggcggtgaggatgttgaagatctgctgggaaatgtactggttggcgtgtttttccatggcattgacgtcaatgttctggatattgccgtcatcgctttcttcggcataacgcatgatgtcgttggagatcagcatcatcgcgttccacggccggattcgccccttcacgctggcttcgctgctgtcttcattggcgaagttgtacgaaaaatcccattcttccgacaggtatttgcacagcagtcgcccggcgttgatgtgcagcgcctcggacatttcgctgcggtggtcggaaatgttcggcagcacgcagatgccgctggtgaagatcggctcgaacacaaaggcgtggccgctcttgctgtcgtgctcatcggcgggcttggtgtcgaaggtcttgttcatgtacgagtgttgctgggccaggccgaattccgaagccatgcctgaacctgtgccgccgccggcgctgaagatcgagaagtacaggcgcgactggttggccttgatgccgcaggagtcgatcaggtacgagtggatcatcttccagtcggggctggaaaaacgctgggtgtctttgttcaggatgatcttggccaggtactggccgaggatcggcgcattgccggcgccgccggcatggacctccgacaggtccatgattttcatcttgctgtagtcgcgcaggaagccgcttttctcgcctttgcgcgagaagcggatacgcccggcgatgtccttgtccaagtcgcccagcatcaccagcggctccaccaggaacaccggtttgctggccttgccgctgcccaggcgcaggttgttgcgcagccactgggccgggctgtagcccttgtcttgtgacttgtcttcgttgctgaattcgttcaggtagaacttgcgcgcgttgtacaccagttccgccacgtccagcgcgatgttcgaaccgcagcggcccaggccgatcaggcacaccgaggggaattcctgttcgttgcgcggatcgctgtcgccttccaggtggggcggtcgcgggaacaccatgtcgcgcaggccgtcgagattgtcgaggatgcggtcggtattggtctcggtgaagtacaggtattgctgggtggccagcgggcgggcggtgctcaatgactttgaacctgagggtgtgtccgcaggagctgggagcaacacgtcggataccacggtggcagagttatttttagaagtcattgtgcgccatgtgcctgggcggatggctgaagagaatcaaggggccatcacggaatgggtgttcgcgactttacagtgcgtccttgtcctggacgattgggttttaccccgatgatttcagggaaaacacggccggactctgatgaatcggccgttcgtcggggttctttaggcaaatgatggcgaaatgccaaagattgggcgtcagcgaattggcctgacgatggatgtggagccgccgcggcctggggaatgctctttgggtgcgctgctgtccttggcgccctgcgtgctgtgcgggtacagcgggttacgcaggctgatgccctgcatcacgcccataatgtcactggccggcacggccgggctcagcaggtagccctggacgaagtcgcagccatgcttgagcagcagctcgaactgggcctgggtttccacgccttcggtcacgacttccaagtgcagggtatgggccatgccgataatcgcctggacgatctcgatatcggcggtggacttgggaatatcctggataaacgagcgatcaatcttcaacgtgttgagtggcagccgcttgaggtaggcgagggaggagtagccggtgccaaagtcatcgatggccagcgacacgcccagcgcgcggatttgccgcagcaacgccagggtgctgctgatgttgcccatcagcgcattttcggtgacttccagttccaggcggttcgcgccgatcccgctgaagcgcaaggcgtcttcgatttcgtccgccagctcgtcacgggccaggttcagcgccgagcagttcaccgccatggtcaggtcggtgtagccccggtcagacagcaggctcaggtcatgacacgcctggcgcagtacccagtggtccagttcggcaatcagcccgttgctttcggcgatgccgataaaccggtccggcgccagcaacccgtgctggggatgctgccagcgcaccaaggcttccaaccgtgtgaccttgcccaatttcatgtcaaagatcggttggtagaacaacaccagttggttgcgggtgcgcagtgcgctgcgcagttcttcctccaattgcagttcgaggaaggcacgggtcttcaggttggagctgaagaagttcaagttgttacgcccggcgtccttggactggtacagcgccaggtcggcagttttcagcagctcttcgcaggtcaggccgtcatcggggaacaggctgatgccaatactggtggtcatcaccatgcgccggccggccagctcgatgggttctttcatctgctgcatgatgcgctgggccaggtgccgcgcctcgtcgcggtggtggatgctgatcaggatgcagaactcatcgccgccaaagcgcgccaccacatccgcatggctgcgcactgagcccttgatatgcccggccagcacggtgagcagctggtcgccggcgtcatgcccgaggctgtcattgatgcgtttgaagtggtcgatatcgaggaagatcaccgccatcatgccgtttgacgcggttttttcggcgagcttctcggcaaagatctgattgaaaccgcgacgattgagcaggctggtgagggcgtcgtaatgggccacctgttgcagcgacgcgcgggcctggtcgagttcgctgagcagggcgttgacccgccgcaggtcgcgttccttgtgctgcagttttttgtcggccagggcggcgctgatgctgctgccgatcaccagcagggtgatgacggccaccgacaagcccagttgaatggggttgttatccagtggcaacgaaaggtcggccccgttgggaacgatgagttgcatggccgccatgccggtaaagtgcatgctcaggatcccggcgccgagtaccaggctggcggcatacttgagcagttgatggaacacaccggcgccggtacgcaggtagctcgacagcaacagcgcagccaggctggcgccgatagcgatacccaccgaggccatgaacagtccagactcgaaatagactttggcctgcgagcgcatggctgacataccgacgtagtgcatcagggcgatgccaatgcccatccacaccgacgccagcaggtactggtggaaacgcaggttggaatgactgagggtctgcatggcgaacaacgaggcgaccaacgcaatcaacagcgaagcaaacgtcatcaacaattcgtagtggattgcgatgggtgcctggaaggccagcatgctgatgaaatgggtggaccagatcccgcctgccaggcaaccggcgccgagccagcgccagtggcgtctggcggtagggtcctcgacatggccgacacgttcggccatatccagcgtgccgaagcccgccgcgcaagcgaccagataggcgagcagcaccagaaaggggttatgactgcaattgagtaataagtgcccgctctctggaagctcggtaaaaaaatgcagacctagccattccatagcatgtcccgtcatagagtcacgtcactgcctgaggcgatgacctatgaggtcgagtatagaagcgtaggaaaattcgcaaggaataatggcactttgcttcgctacgattttggcatgccgtccatagcgtttgatgctaagcgctgatgggcaggtccaattcgataggtgcttccaatggcgccaggccaaaggcggcgcgtgctgcatcgcaatcggcgttgtgcacgccgtcgtaccacgaggactcgaactcacggcacacgcttgagcgttgttcgtagatcgtgcagcgggtgccttggcccacttcgccctcaaggctgcagcagcgcgcgggtttctggtcggtgccgatcatggccacgcgggtcgggttgatctgcaccaccaggtcatcgggcaccgtgccccccgacgaggcgcactcaccccagaagaaagacacacgaaagtgtgaacagcaggcaccgcaattcagacacggactggcttcggacatgggcgtcatcgataagaaaagtaggttggggatgctacggaaggctcgccattctatccgtgccatggccattgggaaggggggcgcgcacttatatttttgtggggaaagtcccgtgttgccgggcgaaatcatgccctatcagctttacgaatcattacagacaaccgggccctgcctgactatgttgcaggtaccgggcaggatgcatcgggcatcgcagctctcataacaataaaagagacggacccatgcagaactcgacccaagcggcgaatgcctggcgcattctgttcctgctgttcctagccaacctgttcaacttcttcgaccgcaccatcccggcgatcatcatcgagccaatccgcatggaatggcacctgagcgactttcagctcggcatcatcggcaccgccttcaccatcgtctacgccattgccgggctgccgctcgggcgcctggccgacaccggctcgcgcagcaaactgatgggttggggcctgttcgcctggagcgggctgacggcggtgaatggtctggtcggcagcttctggacgtttctactggtgcgcatgggcatcggcattggcgaagccagctatgcgccggccgccaactcgctgattggcgacctgttcccggcacaccgccgtgcgcgggccatggggatcttcatgctgggcctgccgttgggcctgttgctggcgttcttcaccattggctggatggtcaaggcgttcgacagttggcgtgcgccgttctttatcgctgcggtgccggggctgatcctggcggtgttcatgttctatatcaaggaacccaagcgcggcgcggcagagaccgtacaagtatcccaggaacgcgtcgaccgcccgatccgccgtgtgctggcggtgccgaccttcctgtggctggtgctggcggggttgtgcttcaatttcgccacctatgcctgcaactcattcctggtgccgatgttgcagcgttacttcctgatgccattgcaggatgctgcggttgctacgggtgtgattgtcggcctgaccggcctggtgggcctgaccctgggcggctggattgctgacaaaatccatcagcgggtcgccaatggccgcctattgtttgcggcgttcagcctgatcatctctaccgtgaccaccgcgtgggcgttacacgccgggcgcatcgagattggtgtgtttgtggcgttgttcagtgtgggctggttgttcgcttataacttctacacctgcgtgtatacagcgatccaggacgtggtcgagccgcgcctgcgggccacggcgatggcgctgttcttcgccggcctgtacttgctgggcggtggcatggggccgatcgtggtgggtggcttgtccgaccactttgcccattcggcgatgtacgcggcgggggcagagcagatgaccgaggcttacaaggccgtgggattgcacgacgccatgtacctgattccggtggcgttgtttttgaccatgctgttcctgttccaggcatcgcgcagttttgtgcgcgatgccaagcggatgaaggatgggctgggggcggttgaggtgccggcttcggcggtgaccgcttgatattgaggtgacgccatcgggggcaagccccctcccacatttgactgggttgtcatatcgatcaccgatcaattgtgggagggggcttgcccccgatggggcctcgaaggccaataaaaaaggcccgcattgcgcgggccttttcatttaacagggcagggcagtgatcaacccgccaccaacacccggatcgcttccaagcgcagcgccgccttgtccagcatggccagaccttgctcgcgctgattgcgcagggccaccaactcactgtcacgcacggttgggttgaccgcttgcaacgcagtcaggcgcgccagttcttcgtcggtgtccgccgccaggcgacgcttggcctcggccacgcgttcggcatgttgcggagtgatcttctcttcgccggcgttgatccgtggcgttagctggtcgcgctgggcctgcacgaacttgttggcgctggcgcgtggcacgctttccagctggtcgttgagggtcacgaatgacacacggctcgacagatcgttgccattggcatccagcaggcagcgcagggcggccggcggcaagtagcgccccaattgcagtgaacgcggtgcaactacttcgctgacgtagagcagttccagcaacaccgtgcccggcttgagtgccttgttcttgatcagcgccacggccgtgttgcccatggaaccggacagcaccaggtccatgccgccctgcaccatcgggtgttcccaggtgatgaactgcatgtcttcacgggacagcgcctggttacggtcgtaggtgatggtcacgccttcgtcgtcgcccagggggaagctggcgtcgagcattttttcgctgggcttgaggatcagcgcgttttccgaatggtcttcgctgtcgatgccgaacgcgtcgaacagggtttccatgtagatcggcagggcgaactggtcgtcttgctcgaggatgtcttcgaccagggcatcgccttcaccggcgccgccggagttgagttccagcaggcggtcgcgaccggtgtgcagctcttcttccaggcgctcgcgctcggcacgggcctcgtcgatcagggcttgccactcgccatcgtcggcgttttccagcagcggcagcaggcgcgggccgaactgatgctgcaaggcgttgccggtcgggcaggtgttgaggaacgcgttcagcgcctcgtggtaccactggaacaggcgctcttgcgggctggtttccagatacggcacgtgcagttcgatcacgtgtttctggccgatccggtccagacggccgatgcgctgttccagcaggtcggggtgggacggcaggtcgaacagtaccaggtggtgggagaactggaagttgcggccttcactgccgatttccgagcagatcaacacctgggcgccgaactcttcatcggcgaagtaggcggcggcgcggtcgcgttcgaggatgttcatgccttcgtggaacaccgtggccggaatgccggagcgtacgcgcagggcgtcttccaggtccatggcggtttcggcgtgggcgcagatcaccaggaccttggtgcgcttgagcattttcagttggtcgatcagccattcgacccgtgggtcgaagcgccaccagcggttttcttcttcgacgtccggctgcgactggaagctgacttccgggtacagctcggcgtgttcgcccagcggcagttccaggtactcgtccgggttcggcagcgggtaggcgtgcagcttgcgctcggggaagccttgcaccgcagcgcgggtgttgcggaacagcacgcggccggtgccgtggcggtcaagcagctcacgcaccaggcgcgcgctggcttcggtgtcgccatcgttgacggcggtgagcagggcttcaccttcgtcgccgaggaaaccctggatggtcttgtgtgcggcaggggacaggcggcccttgtccagcagctcctgcacggcttcggctaccgggcgatagttctcgctctcggcgcggaaggcggcgaggtcatggaaacggttcgggtccagcaggcgcaggcgcgcgaagtggctgtcctggcccagttgttcgggggtggcggtgagcagcagcacgccgggaatcacttcggccagttgctcgaccagcgcgtattccgggctggccttgtcttcatgccacaccaggtggtgggcttcgtcgaccaccagcaggtcccaaccggcggcaaacagcgcgtcctgggccttctcgtcgtccaccagccactctagggccaccagggccaactgggtgtcttcgaacgggttggtggcatcgctttcgataaaacgttcttcgtcgaacagcgccacctgcaggttgaagcggcggcgcatttccaccagccattggtgctgcaggttttccggaaccaggatcaacacgcggttggcgcggcccgacaacagttggcgatggatcaccaggccggcttcgatggttttacccaggcccacttcgtcggccagcaagacccgtggcgcgatacggtcggcgacttctcgggcgatgtgcagttggtgtgcaataggttgcgcacgcacgccacccaggccccacaacgaggactgcaattggcggctggtgtgttccagggtgtgatagcgcagcgagaaccaggccagcgggtcgatctgcccggcgaacagacggtcgctggccaagcggaactggatgaagttggagagttgggtttctggcagggtgacctgctcgttttgcccattgaggccgtggtacaccagcaggccatcgacgtcgtcgacttcctgcacggtcattttccaaccttcgaaatgggtgatgctgtcacccggcgagaacctcacgcgggtgaggggcgcattccgtagcgcatactgacgagtgtcgccagtggccggatagagcacggtcaacaagcgcccgtcctgtgccagaacggtgcctaaccccagctctgcttcgctgtcactaatccagcgttgccccggttgatactgctgcgccatgctgcctgactcccgccgtgaaaaagccgactatcttaacggaacaagcccccacgcccaaggactctgacaaaaactactccgtttgcatggggggccggaagccgaatcgacgggtggcgggcacttgggagtgtcgactgggtcacaggttggcgagcctgtgctcaagtcaccctgcaacccgccgacagcctgttgatcaggagaataatcactatgctgccacccatgctgcccgtcagcgttgtgccggtcacgtcgcaactcgatccggtgcgccagaagccggacatcccgcccgtggtgccggtccagccgggctccaacgagagcaccatcgacctgaaaaagggcgatgccgagacgtcgacctttttgctgcgcgaagaacagcgccgccagcaggaacaacagagacgccggcgtgaagccgatgaagacccggagcagcacctggccattccgggcgatgtgttgaatgccgacaacaccgtgccagtggcgccgctgatcgaagatgcaccgcgccagggcctttgggtggacgtcgaggtttagtcgcgcaactcgcgcagggctgctatcagcaactcgatatcatgctcgttgttgagcgggctcaccgagatccgcgccacgctctccaggccgcgcgcctgcatatccagcggagtgtaggccgcgccgttggcgccgatattgatgcgcttcaaacccaggcgccgcttgagttcaaaggcatcccagccggccaggttgaaggcgataaggccggattggcgagtacccaggtcatgcagggtaatgcccgcaatcccacgcaacgcttcgcggattcgcgcgctggtctgcgaaaccctctcccacgcgcgctcgatgcccagccgattcatctcctgcagcgcattgcccagcccggccagcaaggcgaaggatgcttcgctggtttcaaagcgccgtgcgtcattgcgcaggtcgaaaccctggcccgtccagggcgccgaaaacacgtcgcgctgggccgggttcaggcgcccgaggaaatccggccgcacatacaacagcgccgtcccgcgtggaccgcgcagatgctttcttccggcggacttgagcacatcgcactgcaatgcttgtacgtctaccggcacctggccgacggcctggccggcgtcgataaagtaggggatggcgtgacgcctggccaattcaccgatggcctgggcggggttgatcaggccgccgttggccgggagccaggtgaggtcgatcagctttaccttggcatcgagcattgactccaacgccaccgggcagactgcgccgcttgcatcgcaggggatgacctccacgcgtgcacccgcttgcaccgcccgttccatgctggccaggttgccgccccattcgtgacggcctaccagaatgcggtcgccgggttgccaggggcccagggcctggaacgccaggctccaggcggtcgagccactgctggcaaatgcgatggacgaggtgggggcgttgagcagttgcgcggcggcgcggcgggctctttccaccagcacggcgccatgttcgccggcttccatcgggccgtcgcgagcttcccgttgcagttgctcgatgattgcatcaagggttgcctggctgggcagggaagcaccggcgtggttgaaatgcacgatgccggactggcagccaggcgtgtcatcccgcaggtgctggacttcaagcgggctcatgggtgcagctcgaaaatcgcatcaacctccacggccacaccggccggcagactggacacgccgacggcggtgcgcacatgccggcctttttcgccaagggcgttgaccagcaggttggaggcaccgttggccaccacgctctgttgcgtgaagtcgccgctgctggcgatgaatacacccaggcgcacggtacgcaccaggcgcgacaggtcatcgccgagggcattgctcaactgccccagcaggcccagcgcagcgagttccgccgcttgtgcaccttctgcatcgctgagggactcgcccaaccggcccacataggcgggtttaccctccaccagcgggatttgcccggagacgaacaggtgattctggctgaccacgtggttgatgtaattggcaatcggctggctgggggtgggcagcgtgaggcccagggcttgcacgcgttggcggagggagtcgctcatgatgaatcctcttgggtcgggaggcttcagcatgttggctgtattgaagggcgacaaacggatagatctcacacgacgtatcgaaaaaactcacgcgtcagtgcaggtttccttcagccactggctgaaacatgcggcggcttcgctaggggtgccttgaggtgcgatcagccagtagccgatgtcgctgtgatagggcggccaatcgaaggcctccaccaggctgccgtcctgcagcctgcgctcgatcaggcgatgacggcccatggcgatgccctggccggccacggcggcttcgaccacaatgttgtagtcgtgcagcatcacgcgggggtgctggccgaggtcgacctgatagtgctcggaccagtcggtccattcaaaggggcggtgcgaagtggccatcagcaacgggctgtcttgcgctgccttgaacgtcgggctgcacaccggcgagaggacttccggcatcagtcgcgtggcctgcacatcgggccaatcgcccttgccataacggatggccaggtcgacctcggcgcctgccacgtccgccagttgaatggccggcaacagctccacctgaatatgtgggtagcgattgaggaagccggccaggcggggcgccagccacaaggtcgcaaaggaggccagcaagccgatgcgcagcacggtggcactgggcgtgacgcgttgggcacgggtggcggcggcgatggcgtcgagggctgggcggatttcgtcgtagtactgttggccgtcggtggtcagatcgatcgctcgggtgcgtcggataaacaagggtttgcccaggtgctgctcaagcttttgcacctgatggctcagcgcgctctgggtcactgacaactcgctggcggccttgataaaactcaagtgccgcgccacggcttcgaaggcgcgcagcgccagcagcggcggaaggtccttgtgcagtgccacctgggtgcctctcctggttcggaaaaatagcgattttgtgcgatgacctgccttttgtcgcccgctgatttgccgttgagcgggggaggccgcattattggaccattccctccacgacgtaagccaagccatgagtgaagacgacaagctgatcgacctgaatgccgagcgcgccaagcgcgtgcatgacctcaatgacaaacgcctgaatgaagtccgccaggcatttgaacaggcaatgccactcggcaaagtgaagaaaaaaccgaagaacaaacccaaaaagcgttgaaacagcctgcatccattgatgcaggtcagttattgcccttctttacgccccgtcgcgggcgacattgatccccgtcaattttccaatccgccttctccattaacttagccctatcgcaacagggcaagtgcaggaggccggtcatgtttatcgataatgtggtgttcgccggagtgctgaccgtaagcctcatggtgatgttttttgtagggtttggaatttttatctggaaagacgcgaacaagcggaaaaaaccatagtttttccaggttacatgagcacgcaaggcattttgggcgacttcggtcgcccttttttttgcgcctgaattaacgcaatagtgatcggcataaaaaaaggtgcgaccctcgcggatcgcaccttttttatcgccggcggcttatcagctgcctagcgccttggaagccaaccagaacaacccggccgacagcgccacggttgctggcagggtcagtacccaggccatcaggatggtcttcacggtgccgccctgcaggccgcttttgttggcgaccatggtgccggccacgcccgacgacagcacgtgagtagtcgacaccggcagcgcgaagatgttggcaaagccaatcatggtcgcggtggtgatctgtgccgacatgccctgggcataggtcatgccctgcttgccgatcttctcgccgatggtcagtactacacgcttccagcccaccatggtgcccaggcccaaggccagtgcgacagcgaggatgacccagaatggggcgtattcggtggtggcggtcaggtctttgcgcagtttgtcgaggtcggatttctcacgggcatccaggcctggcagcttgccgacctttttcgcggtgtcgtccaggcagagcagatagcggcgcacttcaatacgctggtcagccgtcaacgcgtgatagtcggacacgcctttgagcgtgtcgaccagcgcgttgatggtcggctcggtctgctgcgggttgcactggaacttgccaggcaggtcgttctgcacgcttttgcccagggccaggaactcgccgagcgtggcgttgttacgctggtagaactggctcaaatgcacggtggcgtcgcgggtccgttcgatctggtaggtggtgctgcccaggtcgagcacgaattgcgccggtacgataccgatcagcaccagcatgatcaggccgatacctttctggccatcgttggagccgtgcacgaaactcacggccatggcggaaatcaccagcaccaggcggttccagaacggcgggtgtttcttgtcgtcgagcttgcggcgctggtccggggtcttgtgcatcttggacagcggacgccaccacttcaggccgatcagcaccagggctgcgacgaggaaaccggccatcggcgagaacaccagggaagcgccgatatccaccgctttctgccagttcacaccgtcagccaggggaatgtcgttgatcagggcgttggccaggccgacaccgaggatcgaaccgatcagggtgtgggagctggaggccgggataccgaagtaccaggtgcccaggttccaggtgatcgccgctgccaataaggaaaagaccatcgccaggccatggccggtgttcacattgatcagcaactccaccggcagcaagtgcacgatggcgtaggcgacacccacaccgccgagcaacacgccgaggaagttgaacaccccggagaagaacacggccaggtgtggcggcatggctttggtatagatgactgtggccaccgcgttagcggtgtcatgaaagccattgatgaactcgaaggcgaggacaaaggccagggcgagcaacaggctcacgagaacccaagcatccagtccgctgaataaatcgatcatgaaggttttctgacccggtcgtaagggggcgcgattatgccagaaaacctcagtaatcgatgcactagctgctcatcggtaacaatcttccgtgaaaaaaatcccggaaaaggcgtgcatcccagggttttcggggcttgggcaagtctttgatttatataggagagggcgctggaagcgggggattgtcacaaaaacgtcacggctgaaacatttgtatgaaattttaccgttcttggtagggtgcaagatttctggctgctagctaagtgccagcaacctgggccaaaaccttgatgctcaaaccgaatcgcttagggctcttcggtttttagttcctgttcaatcttttggatttcctgtgcaaatgcctggtcgagcaggctggcgcgcttgcgccatggtttgcgttcaggttcaggctgggcggcgtaggtggtgacttccccgccgtaaacgtccttgtaacgttgctcctggcgctcaagttccgcgcgcagttcatctttcgtcacatcgttacctaattgagttgagtgtaaatacgttgcagcgttatgccggaatgcgccctcggggtgtttcaagtcgaaccgccatagcgttcaagtttgaaacagacatgggtgaacacttgttagtgccgtcattcaaggcaggtagttgctatcgacgatgcacggcgtgtgcatcacgtggccagctccgttgccgataatgaaaccgggcggaccagtacacagggtgcattatagcggcgcatttgaataacactatcggtataaagttaaaaaccgtcaactttgtatgagtgttctgttacacgtgcctgttggtaattgcacacattcgggtgtcatgaatccatccgaacttcaggcgttaataagacgcctctggtttttttcaatccgccatgggtgaagggggaggttgcgagcaaattgcgataatcgaatgatcgtccgataatcgcacaaagttggcggccttgccttgtgcatctcggctgacgcggcttgtaatagtggccaaacctcccccgcggttgacaataagacaaaggatcccgacatgaacgatcaattgcgcaactctttcgcgtcagtggcgccgccgatcgttgcgtccccggccaagcgtatccaggcgtttaccggtgatccggacttcatgacctccctggcccgtggcctggccgtggtgcaggcgttccaggaacgcaagcgccacctcaccatcgcccagatcagccaccgcaccgaaatcccccgcgctgccgtgcgccgttgcctgcacaccttgatcaagctcggctacgccactaccgatgggcgtacctattcgctgttgcccaaggtcctgaccctgggccatgcatacctgtcctccacaccactggcggtgtcggcccagccttatctggaccgcatgagcgagcaactccacgaagcctgcaacatggcgaccctcgaaggcgacgacattctctacatcgcccgttcggccaccacccagcgtttgatttcggtggacctgtcggtaggcggccgattgccggcctattgcacctccatgggccgcatcctgctcgcggcgctggatgatgcctcgctgcaggattacctcgaccacgccgacctgcagaccaagaccagccgcaccctgaccacgcccgccgcgcttttcgactgcttgcaacaagtgcgtcagcaaggctggtgcatcgtcgaccaggaactggagcagggcctgcgctccatcgcggtgccggtgtatgacgcctcgggccaggtgctggctgcgctgaacgtcagcacccacgccggccgggtcagccgcagcgagttggagcagcgcttcctgccgagcatgctcagcgccagtcgcgagttgagtgcgcagctatttgcttaagctgttcggtgaccgcacagatcccggtttggtcaattgcgctgtttcccctggcttattactgtgcggcagcgctccagggagcgcgcaataataacgacggcccaaggtcgtcagcccgccatcggtgtggaaataaaaacaatgaatcagccctctgtcggtacccctttggacgtgcagtccttcatcaacacccagccactgtcacgctatcagtggcgcgtggtgattttgtgtttcctgattgttttcctcgatggcctcgacaccgccgccatgggttttattgcgccggcgctgtcccaggattggggcatcgaccgcgccagcctcggcccggtgatgagcgccgcgttgatcggcatggtcttcggcgcactcggctccggcccgctggcggatcgctttggtcgcaaagtggtgctggtgggcgcggtgctggtgtttggcgcgttcagcctggcgtcggcctacagcagcaacgtcgatcaactgctggtgctgcgcttcctgaccgggctcggcctgggcgccggcatgccgaatgccaccacgctgctgtccgaatacacccctgagcgccacaagtcgttgctggtgaccagcatgttctgcggcttcaacctgggcatggccggcggcgggtttatctcggccaagctgatccctgcatttggctggcacagcctgctgctgatcggcggcatcctgccgttgatcctggcgctggtgttgctggtgtggctaccggaatcggcacgctacctggtggtgcgcaatcggggcaccgacaaggtgcgcaaaaccctgtcgcccattgagccgaacatcgtcgcccaggccagcagcttcagcgtgcccgagcaaaaaaccgtgaaggcgcgcaacgtgtttgcggtgatcttctccggcacctatagcgctggcacgttgttgctgtggctgacctacttcatgggcctagtgatcgtgtacctgctcaccagttggctgccgaccctgatgcgcgacagcggcgcgagcatggagcaggccgcgtttatcggcgcgttgttccagttcggtggcgtattgagcgcggtgggcgtgggctgggcgatggaccggttcaatccgcacaaggtcatcggcacgttctacctgctggccggggtgtttgcctacgcggtagggcagagcctgggcaatatcaccttactggcgaccctggtgctgattgccgggatgtgtgtcaacggtgcgcaatcggcgatgccgtccctggccgcacgtttctaccccactcaaggccgtgccacgggcgtgtcgtggatgctcggcatcggccgtttcggcgcgatcctcggcgcgtggatgggcgcgaccttgctgggcctgggctggaacttcgagcaagtgctcaccgcgttggtgatcccggccgcattggccaccactgccgtggtgatcaagggcatggtcagccatgccgacgccacctgacgcctgtgggaggggggcttgcccccgatggcagtggttcagccaacacatctcgtggctgatacaccgctatcgggggcaagccccctcccacattgattgagcgttgtctgaatgattagtgaggtaacaatctgttcgataatcgaacgttgagtcgattatcggattgtttggcccatttccccggcttaatcttcaagcacttcggcgccacctcagcgcctttttcgatccacaccgggagcccgaaccccatggctgaaatcctcgcgctgcgtgacgcggtgaagcaatttgtgaacgacggcgacaccgtcgccctcgaaggcttcacccatctgatccctacggcagcgggtcatgaaatcattcgtcagggcaagaaagacctgacgctggtgcgtatgacgcctgacctgatctacgaccagttgatcggtgccggctgcgcccgcaagctgattttctcctggggcggcaaccccggcgtgggctccctgcatcgcctgcgtgacgcggtcgagaagcaatggccgcaaccgctggaaattgaagagcacagccacgccgacctggccaatgcctacgtcgccggcgcatcgggcctgccgttcgcggtgctgcgtgcctacgccggttccgacctgcccaaggtcaacccgctgatcaagaccgtgacctgcccattcaccggcgaagtgctggcggcggtgccgtcggtgcgtccggacgtcaccgtgatccacgcgcaaaaagccgaccgcaagggcaacgtgttgctgtggggcatcctcggtgtgcagaaggaggcggcactggcggccaagcgctgcatcgtcaccgtcgaagaaatcgtcgatgacctgaatgcgccgatgaacagctgcgtcttgccgacctgggccctgacggcggtgtgccatgtgcccggtggtgcgcacccgtcctacgctcatggttacaacgagcgcgataaccgcttctaccaggcgtgggacccgattgcccgcgaccgtgggacctttaccgcctggatcaacgaatacatccacggcaccgccgacttcaccgaattccaggccaagctggccaccgcgcaggaggccaagtaatggcttactcgaccaatgaaatgatgaccgtcgccgccgcgcgccgcctcaagaacggctccgtgtgctttgttggtatcggcttgccgtccaaggcggccaacctggcacgcctgacgtcgtcgccggatgtggtgctgatctacgagtccggcccgattggcgccaagccatcggtactgccactgtccatcggtgacggcgaactggcggaaaccgctgataccgtggtgccgaccggcgagatcttccgctactggctgcagggcgggcgcatcgacgtgggcttcctcggcgcggcccaggtcgaccgcttcggcaacatcaacaccaccgtggtgggtgactaccaccagcccaaagtgcgcctgccgggcgcaggtggcgcgccggagatcgccggttccgccaagagcgtgctgatcatcctcaagcagtcggcgcgttcgtttgtcgacaagctggacttcatcacctcggtcggccacggcgaaggcggcgactcgcgtaagcgcctgggcctgccgggcgcggggccggtagggattattaccgacctgtgcatcatggaaccggaagcggatacgaacgaattcgtggtcaccgcgctgcacccgggcgtgacccgtgagcaagtggtggccgccaccggttgggcgattcggtttgccgagcaggtcgacaccaccgccgaacccactgaagttgagctgaccgccctgcgtgaccttgaagcacgcaccgcagccgcccatggccaagcaccgggagaagcctgatgcgcgatgtatatatctgtgacgccattcgtacccccatcggccgttttggcggtggcctgtccaccgtgcgggcggatgatctggcggcgctgccgatcaaggcattgatcgaacgcaacccgtcggtggattggacggcagtcgacgaggtgttcctcggctgcgccaaccaggccggtgaagacaaccgcaatgtggcgcgcatggcgctgttgctggcgggcttgccggaaagcattccgggggtgaccctcaaccgcttgtgcgcctcgggcatggacgcgattggcaccgctttccgtgcgattgccagcggcgaaatggagctggcgattgccggcggcgtcgagtcgatgtcccgcgcgccgttcgtaatgggcaaggccgacgcggcgttttcgcgcaacatgaagctggaagacaccaccatcggctggcgttttatcaacccgttgatgaaagagcagtacggcgtggacgcgatgccacagaccgccgataacgtcgccgacgattatcacgtgtcccgtgccgaccaggatgcctttgccctgcgcagccagcaacgcactgccgccgcgcaagccgccggtttcttcgctgaagaaatcgtgccggtgcgggtcgcccataaaaaaggcgaaaccgtggtagagcaggacgagcatccccgcgacaccaccctggaagccctggccaaactcaagccagtcaatggccccgacaagaccgtcaccgccggcaatgcgtcgggtgtgaacgacggtgcggcggcgctgatcctggcctccgccgaagccgtcaagaaacatggcctgaccgcccgcgctcgcgtattgggcatggccagtgccggtgttgcgccacgcgtcatgggcatcggcccggtgccggccgtgcgcaaactggtcgagcgtcttggcttggcggtcactgactttgacgtcatcgaactcaatgaagccttcgccagccaaggcctggcggtgttgcgcgagctgggcatttccgacgacgcacctcaggtcaacccgaacggtggcgccatcgccctcggccatccgctgggcatgagcggcgcacggctggtgctgactgcgctgcatcagctggaaaaaaccggcggccgcaaaggcctggcgaccatgtgtgtcggtgttggccaaggcttggccctggcgattgaacgcatctaacaagagaggattgctccatgagtgacaagcccggataccggcgcccgcaagcgggcactcaaccggattacctgcacccggcctaccagtcgacgaacctgcgttcgccgtcgcagcctttggtgttcttgccccattccttgtcggaaatcaccggcccgactatcggtgccgagcgggtcaacgagaaggacaacgacctcaccgcccagcatgaaggcgagccccagggcgaacgcatcatcattcacggccgtgtgctggatgaaaacggtctaccggtgccgggcatcctcgtggaaatctggcaggccaacgccgccgggcgctacaaccacaagcgcgacctgcacgacgcaccgctggacccgaacttcaccggcaccggccgcaccgtcaccgacgccgacggctggtaccagttccagaccatcaagcccggcgcgtacccgtggggcaaccaccacaacgcgtggcgcccggcgcatatccacttttcgctgttcggcccgagcgtgctgacgcgcctggtcacgcagatgtacttccccggcgacccactgctggcgtacgacccgatctacaactgcgtaccggacacttcggccaaggaacgcttgatcgcccgtttcgacctggaaaagaccattccttcctatgccctcggctaccgctgggacatcgtcctgcgcggccgcgacgccacgccgatggagaaatgagatgacactcaacgcgaccacgtcccacaccgttgggccgtattaccacatcggcctaacctggctgaaccgcgaagacctcaccgtggccgccacccttggcgagcgcgtggcgatcagcgggcaggtggtggatggcaacggcgatgtcgtcaacgacgccatgctcgaagtctggcaggccaacgccgctggcaagtacgaccacccggaggatgagcaggacaaggccctggacccgaacttcgaagggttcggccgggtgccggtggatgccgaagggcggttccgctttaccaccatcaagccgggcgccgtgccgggcctgaagggcaccacccaggcgccgcacctggtggtactggtgtttgcccgtgggttggtgaagcacttgcttacgcggatttatttcgagggcgaggcgctgaatggggaggacccgttgctggcgtgtgtgccagcagagcgtcgcagtaccttgattgcgcaacaggatgcggcgggggtgtatcagtggaatgtgattctgcaggggaccgatagggaaacggtgttcttcgattattgagtggttttttagggccccatcgggggcaagccccctcccacatgttgaccgcaccgcctatcaaatgtgggagggggcttgcccccgatgaggtcggttcaggcaccacctacccaaaagtcttcttgcggaacatggttgttgcaaagtatgtctaggctataaccgttcccactgagtgaaaaaaacatgacaacaacaacgagtcactacaccggagaagaacgcagcaaacggatttttgcgattgtcggggcatcctccggcaacctcgtcgaatggttcgacttctacgtctatgccttctgcgccatttactttgccccggcgtttttcccgtcggacgaccccacggtgcaactgctcaacaccgctggcgtgttcgccgccggcttcctgatgcggcctatcggcggctggctgtttggccgggtggccgacaagcacgggcgcaagaactcgatgatgatctcggtgctgatgatgtgcgccggttccctggtcatcgctttcctgcccacctacaaggacatcggcgcctgggccccggcattgctgttggtggcgcgcctgttccagggcttgtcggtgggtggtgaatacggcaccaccgcgacctacatgagtgaagtcgcgctcaagggccagcgcggtttcttcgcctcgttccagtacgtgaccctgatcggtgggcaactgctggcggtgctggtggtggtgatcctgcaacagatccttaccgaagaagaactgcgcgcctggggctggcggatccccttcgtgatcggcgcgatcgcggcggtgatctccctgctgctgcggcgcaccctcaaggaaaccaccagcaaggaaatgcgccaggacaaggacgccggcagcgtggccgcattgttccgcaaccacaaggcggcgtttatcaccgtgctcggctacaccgctggcggctcgctgattttctacacctttaccacctacatgcagaagtacctggtgaacaccgccgggatgcacgccaagaccgccagttacatcatgactggcgcactgttcgtgtacatgtgcatgcagccgctgttcggcatgctctcggacaagatcggccgtcgtaactcgatgctctggttcggcgccctcggcaccctgtgcaccgtaccgatcctgctgaccctgaaaaccgtgaccagcccgttcctggcgttcgtgctgatctccctggccctggccatcgtcagcttctacacctccatcagcggcctggtgaaagcggaaatgttcccgcctcacgtccgcgccctgggtgtgggcctggcctatgcagtggccaatgcgatcttcggtggctcggcggaatacgtggccctgggcctcaagtccatgggcatggaaaacaccttctactggtacgtcaccggcatgatggcggtggccttcctgttcagcttgcgcctgccgaaacaggcggagtacttgcaccacgatctgtaagggatgagctatgacactgcgcacgagcaatcaattgttcgacgcttacttcacggcggacagcatggccgaggtgttctgcgataggggacgcttgcagggcatgctggatttcgaagcgggattggccagggcgcaggcccgggtcgggctgatccctgaggccgcggtcgcaccgattgcccaggcgtgcctggcctcgctgtacgacgtggatgccctcggcgtggcgattgccacggcggggaattcggcgattccgttggtgaaggcgctgggcaagttgattgccagtgaagatgtcggggctgagcgctatgtgcatttgggcgcgaccagccaggatgtgatggacaccggcctggtgttgcaactgcgccgggcgctggcgctgatcgaaaccgacctggcgcgcctgggggatattctggccgcccaggcccagcgttacgccgccgtgccgttggctggacgcacttggttgcaacacgcgacgccggtcaccctggggatgaaaatcgccggttggctgggggcggtgacgcgcagccggcaacggctggtggagctgaagccgcgcttgctggtgctgcaatttggcggtgcttccggaacgttggccgcgctcggcgagcaggccatgccggtggccgaagccttggcaaacgagttgcaactgaccctgcccgaacaaccctggcacacccagcgtgatcgtttggtggagtttgccagcgccctcggtttgatcgccggtagtctcggcaaactgggtcgcgacatcagcctgctgatgcagaccgaagcggcggaggtgttcgagccgtccgcaccgggcaagggtggttcgtccaccatgccgcacaagcgcaacccggtgggcgcggccgtgctgatcagcgcggcgacccgcgtgccgggcctggtatcgacgatgttcagcgccatgccccaggagcacgaacgcagcctgggcctgtggcatgcggaatgggaaaccctgccgcagatttgctgcttggtctccggcgcattgcaacaggcgctgctggtgagcgaagggttggaagtcgaccccgagcgcatgggcaaaaacctcgacctgacccagggtctggtgctggctgaagccgtcagcagcgtgctcgcccaacgcctgggccgggagactgcgcatcacctgctggaacactgctgcaaacgtgccgtcgcagaagggcgtcaactgcgtgcggtactggccgatgagccgcaagtcaccgccgagctgtcggcggccgaactggaccgcctgctcgacccggcccactacctgggccaggcccgcacctgggtcacccgcgccgtagccgaacactttgcttgaggagaccaccatggcatttgtacacctcgccgaaggcgacctgcattaccaactggacgggcctgtggatgcgcctgtgctggtgctgtccaactcactgggcaccgacctgcatatgtgggacatccagatcccggcgttcacccagcactttcgcgtgctgcgtttcgatacccgtggccatggcaaatccctggtcactcctgggccgtacagtatcgagcagctcggccgcgacgtgatcgcgctgctggatgcgctggatatccaacgcgcgcatttctgcggtttgtccatgggcggcctgatcggccaatggctggggatcaacgcgggcgagcgcctgaaccgcctggtggtatgcaacaccgctgccaagatcggcacgcccgaggtgtggaacccacgcatcgagatggtgttgcgagacggcgcagcggcgatggtggcgctgcgcgatgcgtcgatcgcacgctggttcacggcggacttcgcggccgctaacccgcatcaggccaagcagattaccgacatgcttgcggcgacctcgcctgaaggttacgccgccaattgcgcagcggtgcgcgatgcggattttcgtgagcaactggccctgatcaaggtgccgacgttagtgattgccggcaccgacgatgcggtcaccccaccggccggcagccactttatccagaaccatgtgcagggcgccgagtacgccgagttctatgcggcgcacctgtccaatgtgcaggcgggcgctgcgttcagcgactgtgtcattgaattcctgctggcccactgaggagctgtttgtgaacgagaaacaacgttacgccgaaggcctgcaagtgcgccgcgaagtgctgggcgatgcccatgtcgaccgaagcctcaatgccctgaccgagttcaacagcgaattccaggagatgatcacccgccatgcctggggtgacatctggactcgtccgggactgccgcggcacacccgcagcctgatcaccatcgccatgctgatcggcatgaaccgcagcgaagaactcaagctgcacctgcgtgccgccgccagcaacggcgtgacccgtgccgagatcaaggaagtgctgatgcagagcgcgatctactgcgggattccggcggcgaatgcgacgtttcacctggctgaatcggtgtgggatgagctgggggttgagtcccaagcgtaagcttgggacctgagacaaacgtgatatccggttggatttattcatcgctaatgtaatcgctagtgtatacgtaactttcccgctttggctcccccatctctttacgaaaagcattttcattgaaggggtccgggttggtattagtgagcggtgtttttggatcgttatcgtgatcaaagtcgggtttgttggtgggtaggccgacggcttgaagttcgacgttctgttcgccgaagttgtagccgggttgccttgtaccattcataccggtccaggcatgcgacagttcatgatataggaagttgtgaggtccaatgacacggttgggcttgaattcgatataggagcgattgtagcctacttcgcctcccctgtcgggtgtgccactttttccattttgaataaaaccaaaatctgatgtttctgcgtattcggattctctgccttcttctgtgagttttatctcgtttgggttgtgcccgtagtaatagctgttgtcccgggattcaacttcgaatatttttagtggcgcaccatttactgatgctttcgaatctagaaattgcagcattttttgacctgtacgcgaggatctcatcatttccaagtcatcttggacgcgctgcttaaattcaggcgagccttcaactttaattcctgtggctccgacgtgcaggtagttaatagggttgacaatattgtctgggtgtttttgtactgagtcgcttggcttcgcgtagatagaatcaaagcgattgtttgactctattttgtcattgcctgcacctgcatagaaggtagtcaaagatttaccttgtaataggtcgtcacctaagcctccgctcatcacggtgtgtccacgttcactaccataaagtttgtcatctccagggcctccatccatgtagaccatttgcgccttggctccgaatatacggtcgttacccttattgccgtatatataacttatgccccggcccgcacgtatggtatcgttgccgtcattgccttcaacataataagttccggaaccaagtcttattgtgtcattaccccctccgccaaagatgcgggagcgggccccgcgtgcagtgatgtcgtcatcaccgtctccgctttctataatgatttcatttgatacatctttgtcgactttgagggtgtcgtttcctccgtgagttcgaatagttattttttgattagcgtcacctatcgtgtaacggttaggctgtacagtgtagcgcttttcgttgactacgatgtcgagggtttcatctttgcctttgcgcacgcgaatagagtcggctttgttgccggtttctataataaggttgtcgaacgttagctggccgtgcttggagggggagttttttattgattttatggtttcttccctagtgacttttatattttcatcttgatacacaagggttggttgaatgatggttgtatataaaggttcttggtctgtggtgggacgaggtgttcctgctcgctcagtatgcgcacttgaactgttgcgttctccgctgataaatataggagtgtcagaatttttagtagactctgctaatttatatttttcagcgggtgagggcaggggtgggtaatttttaatcatcggttgaccattaaattaaaatgtgaggtacctcctgattggttttttttacgtaatagttccattttcagtttagcgagagtcagaatccccaatccaattgcaggcaggtcggttaggcacctccacttcggcgccagcaacggcgtgacccgcgccgagatcaaggaagtgctgatgcagcgcgcgatctactgcgggattccggcggcgaatgcgacgtttcacctggctgaatcggtgtgggatgagttgggggttgaattgcgcgaataggcgtcagtgggagtcggcatcccatacccaattccacacgcccggcagatgcaccggctcactcacgtccttcaccgtgcgcgccagtgccgcacgctgcagagctgccgtatcggtgtagaacggttcagcggcggtcttcatgccgttgatccgtgcactgtccagcaggatctgcaagtactcctgcatatgccgtgcggtgtagcgattgatgtcgtggaaggtcaccaccacagggatcaccccatccaccgtcggcaactcgcccaacgcaatgtgttcgcgcaccaccgacagttgccgatacaaattggcccggcgccgtgggctgccgttgaagccccagatcttgccgtcattggcactcaaatccgtgagcagcacctgcatgccgtgacgctggtaggcggcgaaggtgcggcggtcgtaattccagaacggcgggcggaccagtaccggcgggttgccggtgatcgccgcaatgtcagcggcaccctgggtgagggtgcgttccagttcggcgtcattcagccagcgatggttggtgtgaaacgccgtggcggtgtggaaggccaggatgtggcccgccgcatactcgcgctgcatggtcttgcggccccgtgaactgccaccggagcgcgaggcttcggtttgcaggaagaacaccgccttgatccccgacagcaccgggttttgcgccaggtcagccaccactgagcggctcggattgttgtagcccgacgcgctgggaccgtcgtcgaaggtcagcagaaagcggatcggcgcccggccttgcaggcgctgctcggtctgcggtgtcagggcaatgggcgcgccaatacagccgctgaggctcagggccagggcaagcacggcggaggcgatggcgaagggtttcatggtgggcgcgggctcgaataggaggccgctgttgggtggatcagcagcggcaggcgcgcacgatacagcaagatggttggtatgaggttaccgcctgaccaacgagcgcggttcaggctcaaccgacgtattaggtacgcagcagcttgcccatttcttcgttcaaggcattttcagtgaagggtttgggattggggggaaactcgggcgtggtcggcaaccctacggcttgacgttcgctgttggggacatcgaatgattcacccttgaacatctccacagtcgtgcctgccagcgcagtgccgttaccggcgtcataggcgtggaccatttcgtgatagagaacggtgataggtgagtatgtcacgccggccagtacttccaggactgagcagttataggagatttcagcccggtcagcccgcgaccccggcacgccgtcgaccatgaaaccccacttggggtcgccgccgaccaccggtgggcgttcgtattgcaacaaggctttgagttcctggctgccataggtgtagccgcttcctgtgtcgagcaggtcctccaccactgtcaccggtgcgccgggctatcgcgttcatttcggcaagtatctgtttgccctgaggggaactgcgcagcaaggccagatcgtcttcgacccgttggatgaagtcggccgaaccttttatgacaaacccttcaagcgacgcgtggtcaggcgtgacggtggttaatctcgagccgttgaggtgccggatcgtatcgccgggttgagcgtagatcaggtcgccggggcgattggcaaccactgcatcacgaccgctgccggtatagaacgtactgcggtcgttgccaatcaagcggtcattatcagcgccgccatgcagcacggtatggccattgaccttcacgtccaactggcctggcagggtctggctgatgtggacctggtccgctttgtcgccggtttcaaggatcaggctgttgctgaggctgttgtcaaagtcgtactcccagactgattgcccgccggccttcaaatttccatcatccagaaacggatgccgatgcgcttgaaccggattgtcgggcgtgaacgccagttgaggaggagtgtcgggtgtatagcggctgttgctgaagaccgtggcgcatgcaatacgatttgaagcgtccatgtgagatccctgtgggagagccaggcattggccctgtctcgtgaagtcgaccggacgcttcaaatcgttcccagggtaaatgttatgcggctttacagcaggctgatcgggtaactgacgatcaaccggttctcgtcgaactcgttgttgctgtagtcgcgacgcatgctggaattgcgccagcgcacggtcaggttcttcaggctgccgctctgcacggtgtagcccaattcgctttcgcggccccattccttgccgtcagtgatggtgccggtgtggacgttgctgccgctgatatagcggttcatcagggtcaggccgggcacgccgagggcggcgaagttgtagtcgtggcgcacttgccaggacttctcctgggcattgtcgtagctgctgttgtagctgtcgttggccagggtgccgccgctggtgccgttgacgcgcatccaggcgctgttgccggtgagtttttgcaggccgacgtagaaggtgttgccgccgtatttggcagagaacaggccagaccaggtcttgttatccagctcgccggcgcgggcgctgccatcgtccttgccatagaaaaagcccaggttggcgcccagggtccagtcgcccaacggctggctgtgggtcaggttgacgaactgctggctgtagatgtccttgagctgggcattccacaggccgatctgggtgtgtttgtcgttgaacaggtattcgccgccctggaagttgaagcggtccgaggtgaacgcggctttgccgaacatcgacatgtcgctcatgctgctgtcgtcacgcgggctgttggcgcggaactggccaccgtagagggtcaggccgtcgatctccttggaggtgatctgcccgccgcgcagggtttgcggcaaggagcggccatcgtccgaacgcaggatcggcagcaccggcatccattcgccaaccttcacttcggtcttggaaatacgcgccttgaacgccacgcccagacgcccgaactcatccgccgggcggccgtcgtggtccaacggcagtagttgggttcccccggtgccacgtccgccatcgagcttcaacgagtacagccccagcacatccacgccgaagcccaccgtgccctgggtaaagccggacttggcgtcgaggatgaaactctgcgtccactcctgcgcaccgccctgggtcttggtcgggttggtgaaattgcggttgaagaagaaattgcgcaggttgaggttggcgctggcgtcttccaggaagccgtgttcctcggcgagggcgggcagggcaagactggcgacagcggttgccagcaagagccggcgcgggtggaaagtgctcatggcgtaaggacctgttgttattgggtttatgcaggtggcggccatggtgcagggcggtgcgggggcgatgaaagtgggggagagccggttgtgggcgatgatcgaacgcaagttggccagtgaagaaaaacaaaaagcccaccaaaaggtgggcttcgttgacgcgggcgctatcagaacaacttcaacgccggtgcttcttctttcaacggctcattcttcgcggtctgctcgttccagccaccgccgagggccttgtacaggttgacctcgctggtgagctgcgccaggcggtcggtgatcagcgattgctgggcactgaacagttggcgctgggcatcgaggaacgtcaggttgctgtcgacaccgatgcggtagcgacgctcggccaggcggtagtaatcctggttggccgcgacgaagccacgctgggcgtccagttgctgcttgtaggtctcacgtgcggcaagaccgtcggagacttcctggaagccggtctggatcgccttctcgtagttggccacgttgatctctttctggatcttcgagtagtccaggctggcgcgcaggctaccggcgttgaagatcgggatgttgatctgcggggcgaacgaccaggtgcccgaaccgcctttgaacaggccgcccaggttagggctcgcggtaccggagctggcggtcaggctgatgctcgggaagaacgctgcgcgggccgcaccgatgttggcgttggcggccttgaggttgtactcggcttgcatgatgtcgggacgacgttgcagcaggtccgatggcaagccggccggcacttcgctgagcaggttatccgacagcggcttgctggcgatattcgccggcaggccggtgcccagcagcagggtcaggctgttttcgtcctgggccacctggcgggtgtaacgcgccagggcgacccgggcgttttccaccgaggtacgcgattggctcaggtcgagggccgaggccacaccgacttcgttgctgcgcgaggtgagcttgaagctttgctcgtacgcgtccagggtgtcctgggtcagcttgagcagttccttgtctgcctgccaggtcaggtaggcattggccacgctggccaccaggctgatctgggtactgcgccgcgcttcttcggtggcgaagtacttttgcagggcttcttcgctcaggctgcgtacgcgaccgaacaggtccagctcatacgagctgatcccgagaccggccgagtattggctgctgatggtcgattcgccggtctgcgacaagcgggccggggtacgcgaacggctgccgctgcccgtggccgacacggccgggaacagatcggcgcgctggatctggtactgcgcggcataggcgtcgatgttcagggccgctacacgcaggtcacggttgttcaccagcgcggtctggatcagctgttgcagggcagggtcatggaaaaactgcttccagccctgctcgacagcggcctggctcggcgcctgggccgacgaatacgccggcccctgcgggaactgtgcggccaccggcgcttcggggcgctgatagtcaggtatcagcgagcagccactaagcacgaatgcggtgacggctagggaaagtagcgacttgctcattggccagcctctttaggggtttcagttgtgtcagtctttttacgttcgccggcggcggatacggttgcgaagaacaggggcacccagaagatcgccagcacagtggccgtgatcataccgccgattacaccggtaccgattgcgtgctggctgcccgaacctgcacccgaggagatcgccagcggcagtacgccgaggatgaacgccatggaggtcatgatgatcgggcgcagacgcatccgcgaggcctcgatggccgactcgacaatgcccttgccttgttcgtgaagttctttggcgaactccacgatcaggatggcgtttttcgctgccaggcccaccgtcaccaacaggcccacctggaagaacacgtcgttggacaacccgcgcatgctggtggcgatcaacgcacccaccacacccagcggcactaccagcaccaccgcaatcgggatcgaccagctttcgtacagggccgcgaggcacaggaacaccaccagcagcgacagggcgtacagcgcaggcgcctgggagccggacaggcgttcttcgtacgacaggccggtccacgcgtagccgatacccgccggcagttgcttggcgatacgttcgacttcggccatggcgtcaccggtactgtagcccggagccggggtgccgaggatttccatcgccgctacaccgttgtaacgcgagagcttgggcgaaccgtagatccacttgcctgaggaaatggccgacattggcaccatcttcccggagtcgctgcgcacgtaccatttgtccaggtcttctggggacatccggccagcggcttcaccttgcacgtacaccttcttcacccgaccacggtcgatgaagtcgttgacgtagctgccacccagggcgatcgccagggtctggttgatgctcgacagcgaaataccctgggcactggccttctcgtcgtcgacggtgagctcgtactgcggctcatcgttcacgccgttggggcgcacacccgcgaggatcttgctttgcgcggcagccccgaggaactggttgcgtgcgtccatcagcttctggtggccaacgccgccctggtcttgcaggaacacgtcgaaaccggtggcgttacccagttccagtaccgaaggcggcacgatggcgaacaccatggcgtccttgaaggcaccgaagaagtaaccctgggcacgcttggccacttcgaataccgaggtggatgcatcacgttcatcccacggcttgagcatcacgaacgccaggcccgaactctggccacgaccggcgaagttgaagccgttaacggtaaataccgatttcaccgccttgccttcgcctggctcgccttccttgtcgttgagcaggaaggcacgcatgtcgtcgatgactttctgcgtacgttcggctgaagatccgaccggggtctgcacctgggcaaagattacgccctggtcttcttccggcaggaacgcgctcggaatgcgggtgaacagccagatcatgccggcgaagatgatcaggtacacgaagaatgcaggaaacttgtgcttgatcatattgcccacgccgcgctcgtagctcagtacgccacggtcgaaggtgcggttgaaccagccgaagaaaccacgcttgggttggccgtgtttctcagggtcgatcggcttgagcatggtggcgcacaaggccggggtgaagatcagggcaaccagtaccgacaacgccatggccgaaacgatggtaatggagaactgtttgtagatcacaccggtggagccgccgaagaatgccattggcaacagtaccgccgacagcaccagggcaataccgaccagtgcgccctggatctggcccatggacttgaccgtcgcctctttgggcgacaggtgttcctcggccattacccgctcgacgttttccaccaccacgatggcatcgtccaccagcaagccgatggccaggatcatgccgaacatggtcagggtgttgatggtgaagccgaacgcggccaggatcccgaaggtacccagcaataccaccggtacggtcatggtggtgatgatggtggcgcggaagttctgcaggaacaggaacatcaccaggaacaccagcacgatcgcttcgaccagggtgtggactacaccggagatcgattcggtcaccaccggcgtggtgtcatacggcaccacagccttcatgcctggcgggaagaacggttccagggacgccacggtggcacggatggccttggcggtgtccagggcgttggcgcccgacgcgagcttgatcgccatacccgacgccggcttgccgttgaactgtgcactgatgctgtagttctggccgcccagttcgatccgtgcgatgtcacgcaggcgaacctgcgagccgtcggtattgaccttcatcaggatcttgccgaactcttcggcggtctgcaggcgggtcttgccgatgatggttgcgttcagctgggtgccgggcagggcaggcaggccgcccaattggccggtggccacctggacgttctgtgccgcaatggcagtgctgacgtcgaccggggtcaactggtagttgttcagcttggccgggtcgagccagatacgcatggcgtactgcgaaccgaacacctggaagtcacctacacctgacgtccgcgagatcgggtcctggatattggacacgatgtagttggacaggtcgtccttggtcatgctgccgtcttccgacaccagaccgatcaccatcaggaagttcttcaccgatttggtcacgcggataccctgctgctgcacttcttgcggcagcagtggggtcgccaggttcagcttgttctgcacctgaacctgggcgatgtccgggttggtaccctggttgaacgtcgcggtgatggtcatgctgccgtcggagttactgtccgaggcgacataacgcaggttgtcgataccgttgagctgctgctcgatgacctgcaccacggtgtcctgcacggtttgtgcggacgcgcctgggtaggtcacctggatgtcgatggcggttggcgcgatggccgggtattggttgatgggcaacttcaggatcgacaatgccccgaccagcatgatcaccagggcaattacccaggcgaaaatgggacggtcgataaaaaatttcgacatgggttactccccctggccagcagcggcggcaggagcgggagcagaaccggcaggcttggcgttgtcggcgtccttgaccttgacttcgatgcccggcttgatgaattgcaggccttcggtgatcacgcggtcaccggcgtccaggcctttttccaccagccagtaggcgccggcagtgcggtttgccaccagttgacgctgctcgaccttgttgtccttgttcaccaccatggcggtcgggatacctttgatatcacgggtcacgccttgttgcggtgccaggatggccttgctgttcacgccggcttgcaactgggcgtgcacgaacatgcccggcagcaaggtgtggtcagggttggggaacacggcgcgcagggtcacggagccggtggtctggtcgaccgatacttcggagaactccagcttgccgtcctggccataggcagtgccgtcttccagggtcagcttgaccttggccgcgttggcgccggctttttccagctggccgctttccaggtcgcggcgcagtttcagcatttcggccgaagactgcgtgacgtcgacgtagatcgggtccagttgctggatgacggccatggcatcggcctggccgttgctgaccagtgcgccttcggtgaccgaagaacggccgatacgcccggagatcggcgcgaacactttggtgtagcgcacgttgatctgggcggtttgaacgtttgcttccgcggtcatgcggttggcgacggcggtgtcgtattcctgacggctgacggcctgctcatcgaccaactgcttgtagcggtcggagatggacttggtctgggtcaggctggcctgtgcgcttttcagggtggcgtcatacaccgacgggtcgatttggtagagctgttgcccttccttcacgtcgccaccttccttgaacaggcgcttgagaatgatgccgttgacctgtgggcgaacttccgcaatgcggtaggcggtggtgcggcctggcagctcggtcgtcagggtataggcttgcggttgaatggtgaccacgccgacctgaggggtttgggcgggcggagccgcttcttcctttttacatccgctgagcagcgatgccagggcgacggcagtgaccagagcggtaacagctggcttaagttgcatgaagatcctcgggtcaggcgcgcagggtgcgcacaagaagtgtggaagggtaaaaaacaagctgtgagtggataagtagcttgctacgcaatatacttacgttcatggttgtttgtaaactcttgacaggcttcgcggaatattgacaaagcaatgcccaaagtctcgattttagtacgttcggcgcccatgacggtgtcgtcccacaagtattcagacggtggtcaaccaccacccacagtgtcctgattgaggttttactgccatggttcgtcgcaccaaagaggaagctcaggaaacgcgcagccagattctccaagccgccgagcaagccttctatgagcgcggcgttgcgcggaccacgctggcggatatcgccgcgctggccggtgtgacgcggggtgctatctactggcatttcagcaataaatccgatttgctgcaggcgctgctcgacacgctgcatgagccactggacgagttggccagggccagtgaaagcgaggatgaactcgacccgctgggctgtatgcgcaagttgttgattcatttgttccatcaagtggccctggacccgaaaacccggcgcatcaacgagatcttgttccataagtgcgaattcaccgatgaaatgtgcgacatgcgccgccagcgccagacccacagcctggaatgcaacctgcgcatcggcctgacattgcgtaacgcggtccatcgcgggcaacttccggaaaacctcgacaccacccgtggcgcggtgtgcatccacgcctacatcaacgggctgatcggccagtggctactggtacccgacagcttccaactgcatcaggaagccgaacgttgggtggacgccgggctggacatgctgcgctggagcccaagcctgcgcaattaagacaaaatgcgtaattgcatcaggttgtgtcaacagtaaagcccaaggaccgtcaatcgtccttacgcctgattagtggggtgactttatatacgggctggcgggtggttgataggtagccgcctaagtattttgtagcgattttgttgcagggctgtgaaggaatgtttcctacaggacgctacaaatcaaaatgtgggagggggcttgcccccgatagcacagtgtcagtcacccgattcattggctgacacgccgctatcgggggcaagccccctcccacattgggtagtcgtactacttcggaataacgattacagcgccagggtcgggtagtcgatatagccgaccgggcctttgccgtagaaggtttccggatgcgcttcgttcagcggcgcatcggctttcaaacgcgccggcaggtccgggttggcaatgaatggcacaccgaaggccaccgcatccgccttgcccgaggccagccatgcattggcgctgtccttggtgaagcgctcgttggcgatgtaggtgccgccgaaggctttcttcaattgtgggccaaggctgtccgcaccttctttctcacgggaacagatgaaggcgatgccacgcttgcccagttcactggcgacgtaggtaaaggtttccgccagattgtcatcgcccatgtcatgggagtcggcgcgcggtgccaggtgcacgcccacgcggccggcgccccagacttcgatggcggcgtcggtgacttccagcagcaggcgtgcacggttttccagcgagccgccgtactggtcggtgcgtttgttggtgctgctttgcaggaactggtcgagcaggtagccgttggcgccgtggatttccacgccgtcgaagccggcggccttggcgttctcggcaccggtgcggtaggcgtcgatgatatcggcgatctccgccgtttccagggcacgtggggtcgggtagtccgccagtggacgcaccaggctgacgtggcctttaggctggatcgcgctcggggccaccggggcttcgccgttcaggtacaactcatgggaaatacggcccacgtgccacagttgcaggaagatcttgccccccgcgccgtgcacggccttggtgacgttggcccagccgcgcacctggtcgttggaccagatgcccggggtgtccggatagcccacgcccatcggcgtcacggaagtggcttcgctgaggatgagcccggcggaagcgcgttgcacgtagtactcggccatcagcgcgttgggcacgcgaccttcatcggcacggcagcgggtcagcggcgccatgatgatgcggttcgacagttccaggtcgcccagtttgatcggatcgaaaatagtcgtcatgggataacacctttctctattaagtggttgatcagtgggtagcgagggccaggtcggcatcgccgccctgacggaaagtaatcagcgtcaccagcagcgcgagaatcgccagggccgctgcggccaagggcacgctggtcaggccgaaaccgtgggcgatcacactgccgccgacccaggcacccagggcgttgccgatgttgaaggcgccgatgttcagggtggacaccaggttcggtgcagccttgccgaaggtcaccacgttgatctgcaacgccggcacggcggcaaacgaggcggtggcccagaggaacagggtgatttccgtcgggatcaccgcgatgctggtccagctcagcgccgtggagaccaccgccatgctgatgaacacgccaaccagggtcgcggccaggcgcttgtccgccagcttgccgccgatgatgttgcccacggtgaggcccaggccgatcagcagcagggtccaggtcacgcccttgggcgacacgccggtgacatcgccgagcagcggcgcgacgtaggtaaagagggtgaacatggacgcggcgaacagcgcggtcatactcagcgacagccagatgccggcgcccttgagggcggccagttcggcgcgcatgtcgagtttttcttcatcacgcttggccggcagaaagcggatcaggccgatcagcgccactaccccaatcaccgtcaccgcccagaacgtcgagcgccagccagctgcctggcccagtgcggtgcccagcggtacgccgagcacgttggccagggtcaggccggtgaacatcagggccacggccgaagcacgcttgttggccggcaccaggttggccgccaccactgaaccgatcccaaagaacgcaccgtggcacagcgcggtgaccacacgggcaaacatcagcacgttgtagtcactggccagggcgcacaaaaggttgccgacaatgaagatccccatcaacgctaccagggccgccttgcgtggcagcctggcagtggccagtgccatgaacggcgcaccgatcgccacgcccagggcgtagccggtgaccagccagccggcgccgggaatcgacacccccaagtccgccgccacatcgggcagcaagcccatgatgacgaactcggtggtgccgatggcgaaggcgctgagggccagtatgagtagcgagaggggcattcgtggttccttgttacagcgctgcgctgtcgtgcgcgctgagttcggtggtgagcgccgcgaggaaggcttggatggtgtcctcgttgcgtttgaaaaagtgccactggccggccttctggctgctgatcaacccggcgcgttgcagggtggccaagtgggccgacacggtcgactgggacaagccgcagcgctggtcgatctgcccggcgcagatgccgtattcgtggttgtgcagttgctcggggaattgcacggtcggatctttcagccaggtgaggatgtctcgtcgtactgggtgtgccagggcttttattatttcgtcgaggtcgatggacatggcaggtgctcggtttcgtacagcgttatatcgcgatgaggcgaactttaaatcggtctatcccgatataccaatatgattttggtctgagcctaggctcattcggtatatcgggttataacgatacgttggcggcagtgatagactgcgcgccatgaattatctcgcacatctgcacctgggcggccaacttcctgagcaactgctgggcagcctgtatggcgacttcgtcaaaggccgcctgcagggccagttcagcccgcaaatcgaagcggcgatccagttgcatcgttcaatcgatcgcttcactgacagccatccgctggtaggtgaggcgttgtcgcgcttcagcctgacccgcaggcgctatgccgggatcgtcctcgatgtgtttttcgaccactgcctggcgcgggattgggcgctgtacgccgaccagccgctggagcgcttcacctcgcaggtgtaccgcgtcctggcggccgaaccgcaattgccggggcggctggcgcagattgcaccgtatatggcggcggatgattggctgggttcgtaccgtgaatttgcggtgatggagcaggtgttgcggggaatctcgcggcggctgacgcaacccgaggaactggggtatgccatgcacgagttgcgagagttgtacgagccgctgagtgaagatttccgacggttctaccccgatctgcaagcattcgcacagatccagctgacaaggtaaagctgaatgtgggagggggcttgcccccgatagcaatggttcagtcaaagcatgcagtgactgacacaccccaatcgggggcaagccccctcccacatttgaacggtgttcacttgagttcaggcagcgaatgctggtcgagcatccacttgctccgcttccggcaccgccccgaacaacgccttctgcaccgcctgctgcgcctgatacgccagcgccgcgcgttcctgtccggcacaggcaatcggcgtgagcacatggatttccacgtcaccctggtcattggcaaacaagcgcatcaggtgcgagagcaaatcatcatcgccaataaacggtgccagcgggtccacttgcccatcacgcagataacggatcgccaccggttgcagcgacacatccgcatcgatcgcactggccagcaagcgcccgtggaacgtacgcaggctgcgcccgtcggtggtggtgccttccgggaacatcagcagcgggtgctgttgctccagatgacgggtcatctgcttgcggatcaactggctgtcgcccgagccccggcggataaacaagctgccagccttggccgccaaccaacctgccaccggccaggtgcgcacttcggccttggacaggaatgacatcggcgccacggcgccgagcagcggtatatcggtccaggacacgtgattgctcacccacagcatcggctgcgtcggcaattcaccgtgcaccgtcacgcgaaagggcagggcgttggtcagccgcgccatgaaaaaccgcgaccaacgctggcgccgcaccatcgaattggcgatgcccaaacgctcgaacaccccaaacacactggccatgctcaagcccagcgccaccaccagcagcacccgggcaatgcgcccgtacacgcgcaggcggctcatcacattgcagccttgaagtggcgcgcgtaacgcgggcacagctcatcgcgcttgagcaggatgaacacgtcggccacctggaaatcttcatcccagcacggctcgccgcagatcttggcacccaggcgcatgtaggccttgagcaacggcggcatctcggcgatcacgttggacggcaagtccagcgccggcagcggttttttcggttcggcgcgcaggtgttcgttgcacaggtagcgctcgcgcaggcgctgcatgatcgcgtgggcctggatcccgccgtcgtgcatcgggatgctcgcgcagcccatcaggtagctgtagccaccctggttgagcacctcggccaactcgccccacaacaccgcgatagtgccgccgttgcggtaggccgggtcgacgcaggtgcggccgatctccaggatcgggccctgcaggtggagcaagccatgcaggctgaattcttcttcgctgtagaaccggcccagggtgctggcggcctggtggtccaacaaacgggtggtagctaccagtcgaccgctgttcaagtcccgcacaccgatgtggctgcagtgaacatcatagtcatccctgtccaggcccagttccgcgcctttcagcttggcgttgaactcgccgctgaacacgttgaaccgcagggcctgggcttcctgcaacgcctgcgcgccaaccaggcgttcggcttgcagacggcgttcattgccggtgtcgctgatgcgggcgatctgagtcatggcgaatctccgagtgccagccacctttcggccggtcgacttgtttgtccaaactcaggctatgtaggctcggtgtcatctccatgaagttatggtgacgcttggatgacaggccttgtgtagcaaatctgtcatcaccctcggctaggctcgcgggcacgaatgcccccttgagtctgcgtccatggtcagaggcttgttgtgtgttgccctgctgttcgtcaccgtcaccgcccatgccgacacctggcctgacaaggattgggccaagggcacaccgctcgaaggcccggctgtcgacgccctcaatgcctacgctttcccagcgcgtgacgacaccacccgcaaaggcatccgcaccgacgcgctgctggtgatccgcgatggcgtgatcatctatgaacgctacggcgctcccaccaccgccagcacgccgcacctcacctggtcggtcagcaaaagcctgatggccacggtgctcggcgtggcctatggcgaaaaccgcttcaaactcaccgaccccgtcgcgcgcttttacccgccgatgaaacagcaccccaaggtgaccatggctgacttgctgcactggtcctcgggcctggactggcaggaagactacgaatacgcgccgctgaaatcctcggtggtggcgatgctctacacccgaggccgtggcgatatggcggactttgccgctgacaccgacgcggcggctgagccgggccgggtgtttcggtactccagcggcgacaccaacatcctctctgccgccctcaaaggcatgctcggccacaaggcttatatgagttacccgtgggatgcgctgttcaagccgttgggtattcgcaacgccatctgggaaaccgacgccgacgaaaccttcgtcgcctcgtcctacgcctacctcaccgcccgcgacctggcgcgggtcggcctgctgatggcgcgtgacgggcgatggggcgatcagcagttgctgcctaaagactgggtcgccttcaaccgccagccgttcgacaaatacaaggtcggccaggacgaagcggcgccgggtggtcattggtggcttaacaaaggcgaaccgcgcccctggcccgacgcccccgccgacaccttcgccgccctcggccactggggccaggcgttgtacgtgatgcctgacgaacagttagtgatcgtgcgctacggcgatgatcgcgacggcagctatcgccataacgaactgctcaagcacgtgctggcggcggtgcaaccatgatccgccgtcggccgtttaccagcctgtttctgctgctgttgctcgccctgctggggtggatctggcacgagcgcgtcaacctgcaagccttccccgacatcatcgcggcgtacacggccaaggaatattgttcgtgccggtatgtggagaacaatccggcggcgtattgccgggggtatgtgaagcagtacgtgccgacgagtgcgttcagcgataacccggagcgcagtgaggtgacggcgagtgggctggggcgcacgcacacggcgcggtggctgggggatcggcaggggtgtcggttggtgccgtgaggcttgtattcaaacagatttcttgtgtcttaatcgcatgcgttgctcttccctaatctaatgggcagtagtttccgggagggaaggggggtgaagtactattgctttctgcctgatgagcctaactgttgaattaagttgcgttgttataggtgatattccaatgtcttctaaaagcctgttatttctgacagttgatggtgttgctcgctttgatgaagaataagcgcgttgttgtcatgatcggttaacttgagtaataggagggcgatgtcatgggtagtattgctattgttgtgactggaattagtagtgatgagagggctgccgcagttttgagacggcttaacaatttggctgttcgtggtcttgcttatgcaccctacgcggatttaatatggtgcgaaactgcaaagcctaacttggaggaagtgcgaggatttaagtttgttgataatcctgaatttgatagaggggttttggctaatatcactggctttttcatgtcggggaagcaatatactgcggattttatattgagtttgtaaagggtataaaaactcgtcggtgataaggtttgatgtcgaaaggtgggtgttaagtctttggtgtttactatgcgatccgcggggaagttgaatatttgtgaacgcaagtttgctcgtgagaaacgtataagcgacgcgtttaatcaggtgccgttgttgcttacgttcttcgcgaacaagcccatttccacattgggtttgcgccgttcgtgacatgcgcttaaggttcgttcaggtttttcgccccacgagtcttcaatgttcaacgcttccgtcatcaagcccgttgccttcgctctgttggccgccgccgctgtgcctgcccatgccgactggtacctggataacgagtcctcgcgcctctctttcgtcaccaccaagaacaccgagattgccgaggtgcagcgcttcctggtgctgcacggcaaagtcgacagcaaaggcgcggcgcaactggaagtggagctggagtcggtcaatagcggcatccctttgcgcgatgagcgcatgcgcaatcagctgttcgagatcaagacgttccccgacgcgctgatcaacgcgcagatcaacctgcagccgatcaatgatttggctcccggcgcacaattggagttgcgcctgccgttgtccgtgaccctgcacggcaaaacccaaacctacagcgccgagttgttggccacgcgattggacgaccgacgcttccaggtagtgaccctggaaccgctggtgatgcatgccgaggactttgacctggcgccgggtgtggcggcgttgcgcaaagcggcggggctcaagtcgatcagtctgtcggtgtcggtgggtgcggtgctgatctttacggcgcgctgacgtgagtggcgcggtgttcccgtggcgcagcgccaaccgtttcgagttgttgatcgacgggccgaattttttcccgcagatgctggtgggcattgcccgcgccgagcggcaagtcgagctggagttgtacctggtggaagccggcgcctgcgccgaagccatggtgcaggcgctggtgctggccgccgaacgcggtgtgcaggtgcgttgcctgttcgatgattacggcagcctggcgtttaccctcgggctgcgcaggcgcttgaccgatgccggtgtggaactgcgcttctacaatcgcctgcgctggcgccgctggatgcgcaacctgtaccgcgaccatcgcaaactgctgttgatcgaccaggacatcgcctttgtaggcggcaccggcgtgaccgatgaattctggacgccgggcaacgacagtgccgactggcacgaagtgatggtgcaaatcagcggccccctggtgctcgactggcaagccctgttcgaccgccaatggcacgccaacaacgcgcgccgcgcctggaaacccgccacccatttcggcttgccacgcttacccaggatgcccgccaccggaccgggcctgggtcgtgtggcctatgccgatgcccgccaacaccgggacattttgcaatcgttgatccgtgccttgaacagcagcaagacgcgtatctggttggcgactccgtacttcctgccgacctggggcgtgcgtcgtgctctgcgccgggcggcggggcggggtgtggaagtgcgtttgctgctcaccggcccgcgcaccgatcacccgtccgtgcgctatgccgggcatcgttattacccacgtttactgcgttcgggcgtgcagatttttgagtatcagccgtgtttcctgcacctgaagatggtgctggtggatgactgggtcagtgtgggctcgtgcaacttcgaccactggaacctgcgcttcaacctggatgccaacctggaggcgttggaccctgaattgacgcgggcggtggcgggcagtttcgagcgggattttgcccagagccaggcggtgagcctggaggcgtggaagtcgcggccgttgtggcggcgggtgaagcagcgggtgtgggggtggattgatcggttggtggtgaacctgctggatagacgcggctagccagttcactgggaggcaaatgtgggagggggctcgcccccgattgcagggtgtcagtcactgaaaatattgactgaaccaccgctatcgggggcaagccccctcccacatgtttacagcagttcgaaggtttgctgctgtacgtcctgggaatccaacccgatctgcacattgaactcgcctggctccgccgcgtacttgagctgggtgttgtagaacttcaagtcttcctcggtgatggtgaagtgcagggtgcgctcttcaccggccttgagcatgaccttctggaagttcttcagctccttgatcgggcggatcatcgaaccggccacgtcctggatgtacagctgcaccacggtttcgccatccaccttgccggtgtttttcagcgtcacgctggcgtccagcttgccggtcttgttcagggtggtggatgacagcgccatgtccgacaggccgaacgtggtgtagctcaagccatagccaaacgggaacagtgggccggtggtgtcatcgaaatactgcgaggtgtagttgcccggcttgcctggggtgaatggccggccaatggtcaggtggttgtagtaggtgggaatctgccccaccgaacgtgggaaggtgatcggcagcttgcccgacgggttgtagtcaccgaacagcacgtcggcgatggcgttgccaccttcggtgccggcgaaccaggtttccaggatggcgtcggcctgttggttctcttcaaggatcgacagcgggcgaccgttcatcagcaccaataccagcggcttgccggtggctttgagggccttgatcaggtcgcgctggctttgcgggatgttcaggtcggtgcggctggacgactcgtgggacatgccacgggattcgcccacggcggctaccaccacatcggcatccttggcagccttgacggcctcgtcgatcatcacctgggctgggcgggtgtcatccaccacttccggcgcatcgaagttgaggaagttcaggtagtcgaccaccgccttgtcgttggtgatgttggcgccacgggcatagatgatcttgcctttttcgccgatcaccgcgttcatgccgtcgagcagggtcaccgattgctcgggtttgccggcggcggcccagctacccatcatgtcgattggcgccttggccaacgggccgaccagggcgatggtcgcggattttttcagcggcagggtgttgtcctggtttttcagcaacaccaggctgcgacgtgcgatatcgcgcgcgtcgctgcgatgcaggcggctttcggcgtaggtgtcggccgggtcatcctcggccttgccgatgcgcaggtacgggtccttgaacaggcccatgtcgtacttggcgccgagcacttcgcgcacggcgttgtcgatgtcgctctgttcgatttcgccggacttgagcaggccgggcaattccttgccgtacagcgagtcgttcatgctcatgtcgatgccggccttgatcgccagcttggcggcttcacgcccgtccttggccacgccgtgcttgatcagctcgaagatcgcgccatggtcgctcacggccaggcccttgaagccccagtccttgcgcagcaggtcgttcatcagccaggtgttggcggtggcgggcacgccgttgatcgagttcagcgccaccatcacgccgccggaaccggccttgatcgccgcgtggtacggcggcaggtagtcctggtacatcttgaccgggctcatgtcgaccacgttgtagtcgcggccgccttccaccgcgccgtacagggcgaagtgcttgacgctggccatgatgctgtcggcattcgccgggctcacaccctggaaggccttgaccatcacttcggcaatgcgcgagaccaggtaggtgtcttcgccgaagccttcggaggtgcggccccagcgcgggtcgcgggagatgtcgaccatcggcgcgaaggtgatatcgaggctgtcggcagcggcttcctgagcggcgatgcgcccggagcggccgatggcctccatgtcccagctggaggccagggctaggctgatcgggaagatggtgcggtggccgtggattacgtcataggcgaagaacatcgggatcttcaagcggctgcgcatggccgcgtcctgcatcggacggttttccggacgggtgatggagttgaacgtgccaccgatgcggccggcggcgatttccttgcggatcagctcgcggggcatttcggggccgatgctgatcaggcgcaattggccgatcttctcatcgagggtcatctgcttgagcaggtcgctgacgaaggcgtccttgtccttgagcgcagcaggctttgtttctgcccagacggggtgggtggccagcgtggcaacaaggccgagcaaacacagcttcttcatgaatatcctttttcggctcactgcacagcgaaaatgcgctgttctgccaaaatgtggggaacgtatgttgttgttcgagtgttataccgacaaatgccgcacacttcggaactcttattagcggtgggcatctttttagctgattgattcgatgcaatccagtcgtggcaacggattatgccttaccggtgcccaattccatcaaggttcgccaggagaaacaccatgcaagcagcacaaggttatcgctggggcttgaaagccgcggttctgctattgatcggcacggtgctcagcggttgcggcatcaacaacatcccgaccctggacgaacaggccaaggctgcctggggccaggtgcagaaccagtaccagcgccgcgccgacctgatccccaacctggtggaagtggtcaagggctatgccgcccatgagcaggacaccctcaccgccgtgatcgaagcgcgggccaaggccacttcgatccaggtggacgccagcaccctcgacaacccggaaaaactcaagcagttccagcaagcccaggacggcttgagcggtgcactcagccgtttgatggtggtgtccgagcgttacccggacctgaaagccaaccagaacttcctggccctgcaatcccaacttgaaggcaccgaaaaccgtatcgccgtggcccgccgcgatttcatccaggcggtgcaggcctacaacaccgagatccgcaccttcccgggccgtctgtggcacagcgtgatgtacagcgacttgccggttcgcgccacgtttgaagccaccagtgccgatgccgataaagcgccgcaagtgaagttcaaataaggccgcgctgaggtgtcgatgcgtttattacggataggcctggcactgtggctgttggcctgcgtgggcgtggcccaggcggcgctgaccttcccggcgctgaccgggcgggtggtggacaacgcccagatgctcgacccggccacgcgccagcaactcactcagcagttgcaggtgctggaacagacctccggcgaccagatcgtggtggtcaccgtgcccgacctgcaaggcgtgccgattgaggacttcggttatcagttgggccgcgagtggggcatcggccagaagggcaaggacaacggcgcgctgttgatcgtcgcccgcgatgagcgcaaattgcgcatcgaagtcggctacggcctggaaggtgtgctcaccgatgcgcagtcgtgggtgatcatcaaccaggtgattgcacccaagttcaaggccggcaacttcagccagggcatcagcgacggcgtggcggcgatgattcaggtggtgggcggcgaaccgctggccgtgccggcccatgtggcggacgccaactttgccaaggataatcccgggttttccatcggtctgtttatcctgctgatcggcgtgttgtggctgtgcaatcgcttgggcctgccggtgggtgcgatcctgctggcgattctcagcagcagcggccgtggcggtggtggcgggggcggcggcggtggtttccgcggcggcgggggcggctttggcggtggcggggcttcaggcggctggtgatgataataatgagagagcaagcacaaccatggcattactgactgaacacgagcagcgccaggtcgcgcaagcgatcgcccgggtggaaaagaccaccgacgcggaactggtgaccgtgctggccgcccgcgccgatgactacgcctacatcccgctgttgtgggctagcctgatcgcgctggtagtgccgggtgtggtgcattacctgtcgggctacctgaccatgtacaccttgctgctggcgcaatgggcgaccttcattgtgctgtgcctggtgttccgcttgcccaaggtgacgacacggttgatcccgcgttcggtgcgccactggcgcgcgtccaacctggcgcgacgccagttcctggagcagaacctgcatcacaccctgggcagcaccggtgtgctgattttcgtcagcgaggccgagcggtatgtggagatcctggtggatgacggcatttccagtcgcctggatgacagcaactgggatgggatcgtcaaggcgtttacccagcaggtgaagcaggggcagacgttggcggggtttgtggcgtgtatcgaggcgtgcggtgagttgctcaaggtgcatgtgccggtcacccaaacccgtaacgaactgcccaatcgcctggtcgtactcgaataaaagactcaacactgggcaaaaaaatgtgggaggggcggtgttccatccaatgaccactgatcaaataaccccgtgctctgaatcactatcccccctaaaatgcccggcattccctgcccgaggcgtttttgttcatgtctgtcactgctcaaccggatcatcatgcccagttcatcgaactgctgagcgcaagcctcgcgcagagtgcctttatcaaactggtgctggccaaatacgtcggtaacgaggctgagttgcagcggctgatcatcaagccggtaacggtcaaggagcagccgtgcctgtccttcgtctatcgctacaagacccgcgatatcaccaagaacttcccggtggccgagggagtggcaacgattgccgagctactgccggcatcgttcaagaacgcccatctgctgtcgctgagcgacgaagcgcagctggaatacagcaagaagaacaaaagctcgttgttcaaaagcaagccgcagcaactgcgcgaggcgccatcggctgagcataaccgcgagaaaaaccgcttcctcgacctgagccggccgttcctcgctgacctgggcgtgaccgacgccaagcagacgctgatcccgtcgatgtcgcgcaagtggaaacagatcaacaagttcatcgaggtgttcagccatgcgctgacctcgtcaccgctgaagctggaccagccggtgcgcgtcgccgactttggctcgggcaagggctacctgacgttcgccatccacgactacctgcgtaacaccctcaaggccgagggcgaagtgaccggcgttgaattgcgcgaagacatggtgaccctgtgcaacgccgccgccgcccgcctggagcacccggggctggtgttcaaatgtggcgacgtgcgcagcgtggcgcccagcgaactggacgtgatgatcgccctgcatgcctgcgacgttgccacggactacgcgatccacaccggcatccgctccggcgcgtcgatcatcatgtgctcgccgtgctgccacaagcagatccgcctgcaaatccagagtccggtactgctcaagccgatgctgcaatacggcctgcacctgggccagcaggcggaaatggtcaccgacagtttgcgtgcgttgttcctcgaggcctgtggttatgagaccaaggtgttcgagttcatctcgttggagcacaccaacaagaacaagatgattctggccgtgaagcgcgcagagccgctggacaatgcgcagttgctggaaaaaatccaggagctgaaggcgttctaccacatcaccgaacactgcctggaaaccctgctgcgcgcggatggttacctggcctgatcggccaatgctacgggcgcaggctgcaccgccgtcttgcgccccagcatcaccgtcacgatcaccccgcacgcgaacacccaggtaatcggctcgatgtgttctccaaagaacaacgccgaaaacgcgatggtgaagaagatctgcaacagctggatctggctgacccgcgcaatcccgcccatggccaacccggcgtaccaggcaaagaaccccaggaactgcgagaacagcgacacatagccaaatgcccaccatgcgcgcatcgaaatcgcgccttgatgttgtgccgccaggtaccacaccgggccgatcagcaccggtgtcgacagcaccagcgcccagcagatcacctgccagccgcccatctccttggccaatcgtccgccttcggcataccccaggccgcccaccgcaattgcaccgagcatcagcaaatcaccggcctggatactgccggcgccggtgatcaaggcgtaactcaacaccaggccactgcccagtgccgcgcaggcccagaaggctttcgatggccgctcatgggacaaccacgccgcatacagcgccacgcacagcggttgcaggccgttgaccaatgcgccgtgggatgccggcaaggtctgcatggcccaggccgacagcaccgggaaaccgagaatcacccccgcgatcaccaggcacaacccacgcacctggcgccagttgggccagcgttcgcgacgccacagcaacagcgccgccgccgggatcgccgcaaacagtgcgcggcccaggccgttgagcaacgggtggatttcctgcaccacgatgcgggtgaagggcagggtcaggctgaagatgatgacgcccagcaggccgagggccatgccggtgttttcgcgcgagctcatggggcaaccaaaacgagagggcttcaagggaagcccatctagccacatcccccgtcggttgcgggcctacagctgggtgcggatttatccgtacagtttttcagaagaagcgcgtgatgctgatcttggcgttgcggccttggctgtagacaccttcaccgctgagtgccggttggtagaagcggttgaacaggttatcgacggtgaagttgatctcggtgcccttgagaccggcctgctgcggtttccaattggcgaacaggccttgtgtgtcgtagctggcgttctccgtctggtcgtagataaagtcgccgatgctggagttcaaaccgcccgcgtaaatatcggtgggcacgcgatcggtcttgcgtacgaactggccctgccagcccacctgcgcgtcccaactcgggatcttggtacccagcaccaccacccatttggccggtgggatgtcccgcgcccacacgtgcaggttggtcgcccaggggttggtgtaggggttgtcgcgcttgcctgtggcccaggagtaagtcagggagccgaacaggtaggtcgagtcgtagtagctttccagctcgacgcccttgatggtcatgccgcccacattgcgatagttggtcctggacgccgcgtcactgcataccgcatcgatactgccggatactgtcagttgccgttcgcagccgacgccggtggctttcatgatctcgtcttcaatacggttgtggaacagcgtggtgcgcagttgcaggttgtcctcgtgggtgaagagccccgagaagttagtgacgttgcctgcggtaatcgccgtaatgcgctccgggtcgaggttcaggctggtggcgctgcgggtgctgagggcgccttggacttcgtactgttcatcgatcactggcgcgcgccaggtgcggttccaactggcgaagaaggccacatccggggttacgttccagaacgcggcgaggcgtggcgaccagccggtgtaggtgcggtcgctgtagtcgtgacccactttcgggtccgggttgctgtagtacggcgcatcgttggcttcgccgcgattgcgcacatggtcgtagcgcagggacggcgtgagggtcacgtcgcccagggtaatcgcgtcctggatgtagaacgcgttgctatcgaccttgccgtggggcatgaaatacggctggaaatgcccatagttgtatctggcagtgttgtaggtcgcacctggcatccagctttcggtttcgcgcttgtgcttgcggatctgtacgcccgtggtcaccgcgtgttccaacgggccggtggtcagcaggctggtattgcgcagttcgaggatgcggtctttgtaggacgtatccatcttgcgtccaccggtcgccaggctaatgacggcattcgcggcgcgctcatcggtctggtcggtattggactccgagtagctcagcttcaggtcgatcagcgggttgttcaacgggtggtactcgtacttgctcgaccaggtggtgtccaccgtttcgcggtcggccagaaagcgtgatacggccgtggcgtagccgtagcggtcgatggccgattgtgtcggcggtgatgggtaggactttgccgagaacggcgtcatacgctggctttgggcgcgtgagtaagacaggcccatgctgtgttcgtcggtgaagtacgcgttgaacttgaacagttggccttcgacatcctgcgcgctgttgggcaagcgtttggggttgatcgggtattcattgcgcgggtcgggaggtgtgccggcgagcttgaggtcgccgccgtcgcgcttggtcaggtaggccaggccatccatgcggccgtcgtcggtgcggccatacaccgcgccggtgtagacctgctcgtggttgttgctggcgtagccgtatttgaccatcgccccggcattttgcccgtccttgagcaggtcgggtgcgtccttggtgaccatgttgaccgtgccgccaaaaccgccgttaccggtaaatggcgagtaagggcctttctccacctcaatgcttttgatcaactcgggctcaatgaagatagtgccttgttgataacgctcgaaaccgcttttggccgcgccatccacggtcatcggcacatcttcggcatcgcccatgccgcgaatgttcatggtctggccgcccggcttgggcgagccacccatggataccccgggcagggtctgcaacagcgaaggaatgttatcgggctggtaacggtcgatatccgcctggctcagggtagagcggcccacggtgctggagtcgacctggctaccggtgccgatcacgctcagtgcatccagttgaacaacgccgctattggtggtcttggcctcttcgggccttaccacataggtactgccgaccttgatcagggtgaactcgccgtttttcagcagggtacgaatcgccgcttccggcgtgaagtcgccgttgagcgcgggcgcctgcacgttcttgagcaactcttcatcgaacagcaactggatctgtgcctgctgcgccacctggctcagggacgtggccagcgactgggccggcagcgtgaagggctcggcctgggcgctgaggctgtacgccaggcaggtggcgatcagggtcggtcgaagaaacaggtgcgaagcgtggcaaggcgcgcgaaacatgaaatcccccggtgtggccaagtggccgaaaaggtgtgcgtatcgaactcagaccggaggaagacggggcagctgaaaaaatccacacctgcgaatgcaaaatattctcaaataagaatcttgtgagtttatttgctcggttcgatcctcacgatgccgtcggtcgacatcacggttttcaccggcagcaaggcgggcaaggcgttgagcagggcgtccggatcattcacatccagattgcccgagaccttcaggtgcgccacggcgctgctgacctgcagcggcgcctgggggcgatacaggctcaattcatcgatcaggctggccagctcgcggttgcgaaatgacaggtgaccgctgcgccagtcggcgacctcttcggcggtgagggtctgctgctgcaccgtgcccttggcgtagctgtagatcgcacgttgccgggcgcccagcagggtgatggggcttttcgcgtccggctcgaaggcgacttggccatgggcgacgctgaccaccagttgctgctggctgcggcgcacatcgaagccagtgccgaccacgcgcacattggcctcgccggcttgtacgaacagcggccgttccttgtcggcggccacttcaatgtacagctggcccttgtccaggtgcaggatgcgctggtgcgcggtgaaatccacgcgtacgcgggtgttggcattcacatacaaagtgctgccatcgggcaggttgagggtgcgcatgcctttggcatgggccgcgacctgggtgtgatacagctcgcggggcgcgccgatatgggtggccaagaccgcgcacagcagagcagcggccacggccagggcagggcgccataccgacggtttgcgctggggcagcgccacgggtttgttcagttgttgcaactgggccaggtctgcccacagctgttcgaattcggcgtaggcacgggcatgggcgggatcggcctgccaggcggcaaaggccttgcgctcggcacgcccggtttcgctgcggttgcgcgcaaaccagctggcggcttgggcatcgatggcgtcgctgtcttcgatgtccagcacgtcggtgtcgctcaggcggttcattctggctgctccgtgccgggttcgtgttgaaggcgtcgcttgcaatgcagcagggcaaacgcgatgtgcttttccaccatgctggtcgaaatgcccatgcgctcggcgatctgcgcctggctcaggccttcgaagcggtgcagcataagggcttctcgcctgcggggcgagagttcggcgaggacttctttcaactgttccaggcgttgcaagcgttgcgcggcggccatgggatcgttttgctcgtcggtgacaggctccgcgtccatttcggcctgatcagagtggactgtgtgccgtaccttctgtttgcgccagtgatcacgcagcaggttgcgcgccatctggaacagaaacgcccgtggctgctcgaccttggcccggtcgcggtagtccagccactgagtgaagacatcctgggtcatgtccgccgcgtcgctggcgttgtccgtgcgtttgcgcaggaaatacaggatatctgtataaaacccgcgaaaggcatcggccgacaacgggtcgggcttgggacgagacatggatatccttcttgacgaagcacgacgtggaaaagtcgtgaatgatatcgagaactattgtcatttgtcattcggttaaatgacagccactgagtccatggcttgtaatcagccgggtgtgacctttaatcctacaagcaagtgaacaaaatcccacttgataaggagagagtcatggctggatggtatgagttgagtaaaagcagcaacgggcaattccgttttgtgttgaaggcggcgaacgcagaaaccattttgaccagcgagctttacgtcacccgcagcgcagccgaaaacggtattgcttccgtgcagaccaacagcccgcatgacgagcgctatgagaaaaaagtggccagcaatggccagccgttttttaacctcaaggctgccaatcaccaggtgatcggcagcagcgagcagtattcctcgacagcggcacgggacaacggcattgcaagcgtaaaggccaatggcccgacgaccacgatcaaagacaagacttgaaggtgtcgcaaaaaaacaaacaccccggctcgcaagaaccggggcgttttttcaggcggcgtccagcagcgccttcaattgattgcgtgccgtttcactcaatgggaacaccggcaaccgtgggtcacccacttccaaaccggtcaaccgcaacccggccttgattgtcgccggcaacccgcccttgaggatgaactccagcaatggcagctggcggtaaaacagcgcctgggcctgggtcagatcgttgctcaataccgcgtcgtacaaatccaggttgagctgtgggatcaggttcggcgccgccgtgcaccaacctttggcacccgccacgaaagcttccagtgccagcgggttgcagccgttgtagaacggcacgtcgctgtgacgatgcaactggtgcatgcgctggatatccccggtgctctccttgaccatggtcacgttggccacctgcttgatgatgcgcaggatcagctccaccgacatgtccgtgccgctggtggccgggttgttgtagagcatgatcggcacgccgatgctgtcgccgattgcggcatagtgggcgaggatttccgcttcgctgagcttccagtaagacgtcggcagcaccatcaccgcatcggcgccattggcctcggcgtagcgcgcgcggcgcacggccttggcagtggtcaggtcggaaacgctgacgatggttggtacgcgccgggcaatcttggccaggctgaaggcgctgacttcatcccactcggcatcgctcaagtaggcgccttcgccggtgctgcctaacggcgcgatggcgtgtacgccgctggcgatcaggcggtcgatggagcggcccaaagcgtcgaggtcgatgcgttggccgtcggcgctgaacggggtgatggtgtagccgatgatgccgtggatggttgggctggacatggaaagtctccggtcgaaaaagggcaggtcagttcaggcaatcggcgtgttggcgcaggttctgccgggcgtagtagttgaacgcggcgccgtggcgcttgggccgggagatccagtcatgggcctcgcgacccagctctggcaggatcggcttgatggtgccggccgccatcgccagcaactgcaacttggccgcgcgttcgatcaattgcgcgatcacgcaggcttcctcgatgctcgccccggtggacaactggccgtggtgcgaaagcaggatcgcgcgtttgtcgcccaaagccgtggtgatgatttcgccttcttcgttgcccaccggcacacccggccaggcctccaggaacgcgcagtcttcgtacagcgggcagaggtccatatgggacacctgcagcggcacttccagcatcgacagcgcggcgatgtgcgtggggtgcgtgtggatgatgcaattcacatccggccgcccacggtacacccagctgtgaaaacggttggccgggttgggaatgccgtgaccttccagcacctcaagatcttcgttcaccagcaacaggttgctggcggtgatctcatcaaaccccaggcccagttgctgggtgtaataggtgccctgttccggcccgcgcgcggtgatctgcccggccaagccggagtcatggccgttctcgaacaggatgcgacacgtgagcgccagcttttgccggtcggtccacgtattatccgcgagggtgttttgcatctggatcagcgcttgcttgaccagttggtctttcgggagtgctaatgtcttggccatatcggtgtcctttgggtggttcaatggacgtcggatttgctgtctcccgctgctcgcaaggtcgttgggtgaaggcaaatgacactaaagatgctatatgacaccttgtgtcattggcaagcacagctcatcgcttactgcatggattaaccgcagcgcatgtctatccgtttgaaattattgagaaaaaaacttggcgtcaccctggaggccctggccgaaaagtccgggatgaccaagagttatctgtccaaggtcgagcgcgggctcaacacgccatcgattgccgccgcgctgaaactggccaaggcattgaacgtcaaggtcgaggaactgttcagcgaagacagcgtcagcctggacagctacagcctggtgcgcagccatgagcggcccgacacctcgcccggttatgcggtgctggcccatcaggtcagtgaacgcagcctgctgccgttcatcatctacccgccggcggagttcaccgacaagaccttcaaggagcatctgggcgaagagtttctgttcgtgcatgaaggccaggtggaggtggacttcatgagtgaacgggtgatcctggagcggggcgatgcattgcacttcaatgcgcagaagccccatcggttgcgttcggtggggccggtgcaggcgcagctattggtggtggtgcacagcggcgaagagtgatcagcgttcgacaggaactgacagcgccggattacccaatggatgggtacgcgccgtaaagaacttcagcgccactccagccccgtcgaacaattgcgaataccgccgcttctgctgacgaataaacccatcgctgcgccccgacaccgagattgccagggttgtcacatcggcctggcgaatcgcatccaccaagtgctgatcctgctcccccagctcgtggccaaagatgcacagcgcgccctggtggttcagcagttgctcataacagaacgacaggtaatccgagctgcggatggtcttgagcttctcttgcaccttgccctcgctgacgaacagcggcacatcgtccagggtcttgatggtgttgttgatcgcaaaactgctgagcaaggtgctgtcggtggtcggcagtttgcgcgcggtgccgtcgaggttacgcaccaggtgcaggccgccgtgcaggtacaaaatacgcgtggcgtcggtacgggtgttgcgcaggtcgaagctggcgtcggcgctgcggaacaagtcgtcgatgcccggcgcgtgcagggtcgcccagtagttgagcaagtcgtagttgctggtgaacaccgtcgcgtagtgctgcaactccgtgttgagggtcgccagcgtcgacggttgcaccaggcgccaggggatatgcacggcgtggatggtattgatcaacgcttccttgatcgcgtaatagcggttgcgcggtgccgccgaactgacggccagggccttgttgacccggctggtggtcttcaacgcgcccagggcctgctcgaagctgcgggtttgcagggcatcgaacacgctgagttcggattggccgaggggtttttcttcgacggtgcgagcgttttcgaacagcgagtcgtaggcaaagtcttcccaaatcgtgcggctggcgccgttgccgatcagaatcccgctgaagtcgaggctcgcgcgcagtgcgctccagtcttcaaggtgggcgtctatatcctggaaatccttcatcggggcgggtctactcgaaatcggctggacggtgactttatcacgagcgagcgttgatcctgatcaagatgcagaacgcgtcatcggttgattctgtaggcataaagcctctgaggattgaccatgagcagcaccttcttcatccccgccgtcaacatcatgggcaccgactgcctcgacgaagccatgatcgccatccgcaactatggttttcgcaaggcgttgatcgtcaccgatgccggtctggccaaggccggcgtagccagcatgatcgccgagaaactggcgatgcaggacatcgattcggtgatctacgacggcgccaagcccaaccccaatgtggacaacgtcgagaaaggcctggcgctgttgcagcagagcgcctgcgatttcgtggtgtccctgggcggcggctcgccccacgactgcgccaagggtattgcgctgtgcgccaccaacggcgggcatatcggcgactacgaaggcgtcgaccaatcgagcaaaccgcaactgccgctggtggccatcaacaccaccgccggcaccgccagcgagatgacccgcttctgcatcatcaccgacgaaagccgccacgtgaaaatggccattgtcgaccgcaacgtcacgccgctgctgtcggtcaacgacccggcgctgatggtcggcatgcccaagggcctcaccgccgccaccggcatggacgcgttgacccacgccatcgaagcctacgtgtccaccgccgccacaccgatcaccgacgcctgtgcgatcaaggccatcgaactgatcagcgccaacctgcgcctggccgttcgcgacggcactgacaaggccgcacgggaaaacatggcctacgcgcagttcctcgccggcatggcgttcaacaatgcatccctgggtttcgtacatgccatggcccaccaactgggcggtttctacgacctgccccacggcgtgtgcaacgcggtgttgttgccccacgtacaaagcttcaacgccagcgtcagcgccaaacgcctgagcgacgtaggccgagcgttgggtgcggacatcaagggcatcaccgatgaagagggcgctcaggccgccatcgccgcgattcgcagcctggcccacgacgtcgaaatcccggcggggttgcgcgaactcggcgccaaactgcaggacattccactgctggcgagcaacgcgttgaaggatgcatgcggcctcaccaacccacgccgcgcggaccagcggcagatcgaggagatctttcgcagcgcgttttaatccatccgacaacgggcgacgcatatcgatgcggcgcccgccaacaccacacataaaaccgccaacggccaggcctgttgactcaccagcaggctcgccacgccgccgatcaacgcggccatcaactgatgcatgaagccgctcaacgccatggcgtaggagccgctcaccggtgaggcatcgttggccagggacaaactgatcgggtaactcatcgcttgccccagcaccgccacgcagtaaggcagccacagcaagacagcgattccgccagcaaacacactgctcagcaacatcacagccgttcccgttagaaccagggtcatgccccaacccatcattttcagccgccccgtgcgagcgacgaagcgattgaccattaatgcccccgccagatacgccacgctgattggccaacccagccagccatattgcgccgcgctccactcgaaacgcccttgcagaatcaacggtgcacaggtgttgaaggcgatgatcaccccataacccaggccaccgaccaacgccgcgtgcagaaacggcggatgctgcatgatcatggcgtagatacgccaggcagatgccgatgtatcgacctttacccgtgcagggaacatcacccggttcaacaccagcatcaaaccgactgcgccaatcgccaatccgtagaagatcgcctcccagccgaagaccacctgcaacaacgacccaacgaattgaccgatgcccaaagcaatcacgaaagtcatgcccagccatgtcaacgcttttgccagcaatgcaccgctgaagctgtcacgcaccaacacccgcgccatcaccgaaacaccgcctgcccccaacccttgaaccagccgcaacgccaagaagacttcaacgctgaacgccgagggaatcgccgcactcgctagcgcatacacgcagagcgccgccaacagcaccggcttacgcccaaagcgttcgcccaggctgccccacagcaacatcggcaatgccatgccgaccaagtagatcgccagcgccagcgcgacgtggtcttctgcggcggggagtgcatgtgcaatcgtggggacggcgggcaggtagctgctgatgccgagttgggcgaggaaggcggcactgcaggctatgacaagggtggtggtatttttcaagacgaggaaaccgccagcgtgagttctgaacaaatcgtcggaagtcgggttatatgaatcgtgccgtttgaaactcttcatttttgaagcgtgtgtaattcagcgagcacgtttattttcttctatcagactcaggagccttgagcaaaataaacgtattgtttcatgggtcatatctgctcgaagcgttatacgaattgcggcccttcctctgggaacaacagggaaaaatacagctgacgtgaagaagccactgtcggcgagttgtgctgcgattgtgttcgcttgttgcgcctcgccgcaggccacgagacggattgcagtactcgtgccgtactgcgcagtttcaataagtctgtcaaataattggatgttggcgaggagtttatcttgaagaagagtcagttccttcgtttggtgaatttttacagaggcaaagccagcgccaatagcggcagaatttagactctgggaccagttgctgggtccaccgtatcgatgcatgagacttttttgtttttcggtaccaaacataaccagtcctccactagcgccgaatgatttgccgagcgatgcaacgattaaggtttgatcgtctagcgtttgaaaattagggcggatgaagccttttcctttctccccaaaagccgacagagcatgcgagtcgtccagatataaaaatagaccatagcgggatttaaggtagatcaaaccgtcaatatccgcttttccacccatgctgtagatgccatcggctacgtaggcgactttcttgtgtttcttacatgattcttcaatgaagtctatgtcattatgcggcgctgttattacttctgtttcatccgcgcaggaggccttcatatagttcattgaatagtgagaatgtctgtcgaatatcatcgtaggggggacgtttttggtaaacgctccgctggcaagtaagggcagtaatccagcgctggccgcgctgcaagataaggtgctcagacagattgagtcgaaagcgttgaaagcgctgtttcatattgttcgagcatgtccagcttgcatctattttttgagttcgctactcgcagggtcttggctttgagtatcccttcgatagcgccatccagtatttgctggttgtaatcaagtccgaggtaggaggtggtgcagaaatgttgaagttcacggccgtattggtcggcaaagcagttgttgcttttgatgattgcattaagttcacaggttagtccttctttggccgattcccagtcttggttggaggtttgaatgatttttttatagtttgagaatttgttggttgacctggagctttccatttttctgtccttggcgatggagagaaataacactaatgggaatttttttgaaggttaagtcaggactttctttttgaggtggcagtcggcggatattttgatgtgtgtaacttcctacaattttcattggcgtgtattcatctgcactgaatgggtaacgagatcaaggcgttttttatcgtggtgtttcgagctatacccagaggcgtcgtacgatttgatgaagtcacctgtcaccctattgagtaaggtggtagtgcaagggcctaatgtgacgatagcctccgaagacctgtctctcaggtagtcaaaaccagcgggatgaagggagtagtagatgagagttctgttattcggtgccaccggcatggtcggccagggcgtgctgcgggagtgcctgctggccgccgacgtgcaggaagtggtcgccgtcggtcgtacgcccctgactcaggaacacggcaagctgcaccaggtgttgcacagcgacatgctggatttccaacccctggaaaacctgctgcaaggctttgatgcgtgtttcttctgcctcggcgtttcatcggcgggcatgaatgaagccaggtacacccacctcacctacgacctcaccctggtcgccgccagcaccctggcgcggctcaacccgcagatgacctttatctatgtgtccggcgccggtaccgacagttccgaggcgggcaagtcgatgtgggcacgggtcaagggcaagaccgagaacgccttgctgcgtctgccgttcaaggcggtgtatgtgtttcggccaggggtgatccagccgctgcatggcgtgcgctcgaagacgccgttgtatcagtggttttattccgtgcttgggccgttgctgtcgtttgtacggcggctgaaaccgggttgggtagtgagtaccgagacggtgggccgggccatgttgcaggcggccagccacggcgcgccgcagccggtggtggaacaggccgggatcaaccggctggccagcgagcgtcgctgatgctgcacaagagcctggtgcgtcggctggacttgatcacgctgcagctgttcgtcgcggtgttcgaggagggcacgctgacccgtgccgccaaccgcgaagccatcgccgtgtcggccgccagcaagcgcctgatggaactggagcaggtgctgggcgtgagcctgtttgtgcggcgggccaagggcatggacctgacggccgctggtgagaccctgctgcaccatgcgcggcagatgttgttcaacgtcgagaagatgggcctggaactgggcgaacacagccatggcgtgcgcggttatgtgcggatgctggccaatctgtcggcgatcattcagttcctgccggaagacctgcgggacttttccagactgcaccccgaagtcaaaaccgacctggaagaacgccccagcaaaggcgtggtgcagggcgtattggatggggtcgctgacctggggatctgctccagtgacaccgacaccaaaggcctgcccagcgtgacctatcgccacgacaaactggtggtgctgatgccgaaggatcacccgctggcaacgcgcgaaagcctggcgttcgtcgacacccttgacagcgattacgtcggcctgcacgccgccagttccatcaacatgcgcacccacgccgccgcccgcgaggcgggcaagctgctgcgcctgcgcattcatgtaccggggtttgatgcgatgtgccggatggttcaggcgaatatgggcatcggcatcctgccgcagaaggcgtacgaattgtttggtcgcgcactgggtttgcatgccgtaccgctgacggacgattggtcggatcgcagcctgatcctggtggtgcgtgatgaaacccagctgtcaccggtcagtcgattgttgttcgattatttgagcgttcgcgtttagcgaacgctgcttgccaactgacggttggatttctcctgcacctggcctctagtcttggccgcacattccaagaataagaggtgcaccccatgacggctcccctgagcggtatcaaggtgatcgagatcggcaccctgattgccgcgccgttcgccgcccggctgatggccgagtttggtgccgaggtgatcaagatcgaaaccatgggccagggcgacccacttcgcaaatggcgaaagctgcacgaaggcacgtcgctgtggtggtacctgcaatcgcgcaacaagaagtcactggcgctggacctcaagtcgccggaaggcctggacctgatcaagcaattgcttggcgatgccgacgtgctcatcgaaaacctgcgccccggcggcctggaaaagctcggcctcggctgggacgtgctgcatgcgctcaaccccaagctgaccctggtgcgtatctctggctatggccagaccggcccgtatcgcgaccgccctggcttcggtgccatcggcgaggccatgggcggcatccgctacaccaccggcaacccggactcgccaccggcgcgggtcggcgtaagcctgggcgattcgttggcgtcactgcatggcgtgatcggcgcgctgatgtcgctgctgcgggtcaagaccggccagggcgacgggcagattgtcgatgtgtcgctggccgaaagtgtgttcaacctgatggaaagcctggtgccggaatacgacatgctcggccatgtgcgtgaacgcagcggcggcgccttgccgggcattgcgccgtccaacacctacctgaccgccgacggggcttatgtggtgatcgccggcaacagcgacccgatctacaagcgcctgatgcacaccatcggccgcgccgacctggccgaagcccccgagtttgcccacaacgatggccgcgccgccaagagtggtctgctcgacgccgcgatcacccactggaccagcagcctgcccatcgagcaggtgctcagcgccctggaagccgccgaagtgccggccggacgcatctactccgtggcggatatcgtcagcgacccgcactaccaggcgcgtgagatgttgctcaatgccgagctgcccggcggtgtgtcggtgaagatgccgggcatcgtgcccaaactctcggagacccccggcggtgtgaactggcaaggcccgaccctgggccaacacaccgacgaaattcttggcagcctgggcctggccggtgccgatatccaacgcctgaaaacctcgggagtggtgcaatgatcacagactattgcgacccgctgatcgtgcaggaagtctccccgcgtgacggcctgcaaatcgagccaacctgggtcgaaacagcggataagatcgccttgatcgatcaactgtccctcgccggtttttcgcggatcgaagccggttcgttcgtttcacccaaagccatcccggcattgcgcgatggtgagcaggtgttccagggtatcgaccgcaagccgggtgtgatctacgtcgcgctgatccccaacctcaagggcgcccagcgcgccgtcgagtcccgcgccgatgagttgaacctggtgatgtccgccagccagacccacaacctggccaatctgcgtatgcgttgcgaagcctcgttggcggcgtttggcgacatcacacggtttgccgccgagcatccggtaacgctcaacggcagcatcgccaccaccttcggttgcccgttcgagggcaggatcgacgaagaccgcgtgctgcagatcgttgacgcttatctcgagctgggcatccagggcatcagcctggctgacaccacaggcatggctaatccgcgtcaggtggagcgcctggtcaagcgcgtgctgcagcgcgtatccgcccgtgacctgaccctgcattttcacaacacccgcggcttgggcctgtgcaatgtgctggctgcctatgaggctggtgcccgtcgctttgacgcggcgctcggcggtttgggcggctgcccgtttgcgccgggggcttcgggcaatatctgcaccgaagacctggtgaacctgtgcgaagaagtcgggattcacaccgggatcgacctgccgcacctgctgcacatgtcccgccgcttgccagccctgttgggccacgagctgcctggccaggtggccaaggccgggcgcaattgcgacctgcatgcgccaccggcctacatcgccacgctgtaacgccgtaccagacaacaaaaacaatcgggcgccgctgagcagcccgctggagagaaaccatgagcactaatacgttggaggctggcgtgcgcccggccgctgaaatcgatgccgaaaaagccctggtcagcaaggtcgcctggcgcctgatgccgctgatcatggtgtgctacctgttcgcgttttttgaccggatcaacatcagctttgccaagtttcagctgcaagcggacctgagcctgagcgacaccgcctatggcctgggtgccggattgttcgtggtgggatatgtgatctttgaagtgccgagcaacatgatgctgtacagggtcggtgcccggcgctggattgcacggatcatgatgtcgtggggcctggccacggcggccatggtgtttgttacggccgaatggcagttctacgggctgcgcttcatcatcggcgcgatggaggcggggttcgcgccgggcgtgctgtattacctgacgttgtggtttccgcagcacttccgcgggcgcatcacgtcgatgctgttcctggcctcggcgtttgccggcctggtaggcgctccgttttctgggctggtgctggaacacctcgacggggtgttgcaaatgcgcggctggcattggttgttcctgctcggcggcttgccctgtatcggcctggggttcctggtgctgacgttgctcaaggatcgcatcgaagacgcccactggctgacggcggcggagaagaccctgctgtcgagccgcatcgccaagcatgagccgaaccagcacggcggttcgttgctgtcggcgatccgcatccctggcttcctgatgctcggttttatctacttcctgatccaggtggcgtcctacggcctcaacttctgggcgccgcaattgatccgcagcgccggtacccagagcccggtgatgatcggcctgctcacggcgattccctatgtgtgcggcgccatcagcatggtggtgatcgggcgcctgtcggatgccaccggcgagcggcgcaagtttgtctgcgggctggtggtgctgggggcggtaggcttcttcagtgccgggatttttgccgaccacactaccttcctgatcattgccctgggcatgttgggcgccggcatcattgcctcgatcccgaccttctggaccctgccgcccaagctgctggccggcgccggtgccggcgcggcgggaggcattgcggtgatcaataccctcgggcagttcggcggcattgtcagcccggtgatggtggggcggatcaaggatctcaccggcagcaccaccccggcgctttacgtgatcggtgtgtgtgcgctgttggcggcggcgctgttgctgtggggactgccgcagaagttgcgcaccctcgataaaggctgatcttgaccgcaaccccgctgattggaggaggaccgttcgtcgcaccagcgagttttttctaaacctttaccgccctcaaaattcgaaatgagggcggggtgtattccccggcccctatttttgccctggaggaacccatcatgagccgcatggctatccggttacgcaccgccagtttcgcgatgctgctgggcctcggcgccagcaatgccttcgcccaatcgcctgctgaattcatcgagcaggcttcggccaaaggcatggccgatatcgaaaccagtcgcatggcccacgccaagacctcgtcccaggaaatcaaggactacaccatcgaggtgatcaacgagcgcaccctggccaaccagcacctggcggccatcgccaagaagctcgatttgcccgtggcgccgcgcgagaagatcgtcgataaagccgaaaccctgatgccagaactcaaggacggcgactccttcgatgcggcctacacggcgcagcaggtgaaggaaaatgaagacgccatcgccttgttcaagcaggaaggcgcggcgtcggatgtgccggaaatcaaagccctggtcgatgagacgttgcccaagctggaagagcgtctgcaaaaggctcgtgccttggcgtcgacctatggcaaaggccatcaaggcgacggttgaacctgttacttgaattgaaaaacggcggttggatcatctccaaccgccgttttttataggctttgctagaacgccatttccgcctggccggtgccctccagcgcgagcaagtattgcttggcttccaaacctccggcaaagcccgtcaagccacctgaggcgccgatcacccgatggcacggcgcaatgattgaaatcgggttgcgcccgttggctgcgcccactgcacggacggcctttgggttgccgatctgctgggcaatctggctgtagctgcgagtttcgccaaagggaatggtcagcagcgcctgccagacctgcttctgaaaatcggtgccggtaaactccagctccaggtcgaactggttgcgggtgccggcaaagtactcgtgcaactggcgttcggtttccagcaacaccgggctgccattggcctcgtgcagctcacccaggcgcacacggttggcgcgttcctcttcccagaggatggcactgagcttgccagcacgcgccacgagggtgagtacgccgacaggcgaaggcatgagcttgtattcgtaggacatgagcgggctcctgggtgggcggggtagcgttgaatctagaacacgccgcccaacgagaaactacgtttcttgcgattgaattcggtttgttcagtggtcttgctgcaacactttaagcgccgctgaggccagaaagccggaacggcttttttcttccgggtggtgcagcacatattcatcgatgcggttcaacagataaccgggcagcgtgatgttgagcttctgcgccttgcccaggtacttggtgacatcaatgtccaccaccgcccaggtgcaacctgcatagtgagggttggcggcgtgcaaggtgaccttttgcgcactgggaatcggtgcaccgtcttccgccaggatttcgaaatgtccttcaatggcttcgcgggccatggccatggcgtcgtccaagtcgtcgccggcggagtagcagccgggaatatccgggacttctacgccccaggcgtggtcgtcgtcgccggttgaaattgcaatcgggtaaagcatgtctgttgtcctccacggacggttaactcagcagagcctgtttcaaaatgctcttggcggtcttgtccaacaggtccttctttggatggggaatcgtcaccagccccggttttgtcgggtgcttgaagtggtggtggctgcctctgatacgtaccagataccaaccgtccgcaacgatgtgacctatcaaatatcggctatccacaacacctccttgtggtgtgtgatggtggtgactataaccactgaattgaaattatcaacactctacctaccagtggtcgatgaccggcattttggcaggtggtcaatggagtgtatgagcgcgacggaatggcgctgcacagaggtattgcgaggttttgcagcggcgttaccgggccggtagcgtctgtgcaatgacggcgagaaacgcatcaaccagcacactttttgtttctgcgcgggtcagtaccaacagctgcgcacacgcatccgcttccaccagcggcctgtacgtcacgcctttattcatcaggctctgcgtacacgccggcaccaacgccacgccttgcccggcggccaccagcgcaatgatcgaggtgatttgccgcccggtcgggcctgggcgtagcggctggccgtggtggcggtaaagctgttcgatggactggttgagccccgagccataatccgctggaaacagaatcaacgggtaggtactgagctgcgccaggctgacgtcgggttgattggccagcgggctgtccctggacacggcggccaccaagggttcctcgcccagggacagcgcttgcaccgcttcgccttgcggcaacaggcggctcaggccgatatccagccgcccatccgccacttgcgcacccaggctgcccgaggcgcattccaccagggtcaattgcacatcgggaaagcgttgggcaaacgcctggatcgcctggctgaacaggtccgacagggcgatcgaactgacatagcccaacgccagttgcccggccgtacctgccgcgagtttgccggcgatcacctgtgccaattccacctgctccagtacgccgcgtgcatagggcaggaatgcgcggccttgcgcggtgagggtgaccgtgcggctggtgcggtcgaacagcttgaagcccagctcggtttccagcgccgagatctgtcgcgtcagcggcggctgcgccaggtgcaggcgaatggcggcgcggccgaagtgcaattcttcggcgacggtcagaaagtaacgcagcttgcgtaggtcgagcatcctggtccttgggtatcgatcggtccgaaatcggtattggttcaagacctgccggccattctataaagacctcacaaaataaaacgagaggtttcatgaaaccgcgcctgcattgtgcccgtcttgccctgttcctgtgtggctgcgcggcgttcctcaacctgtatgccacacagagcattctccagacatttgctacgcagtttcacatcagcgccaaggcggcggggtggagcatcaccgtgacgacgctggccgtggcgatcactgcgccgtttgtcagccgcctgaccgggcgcttcgaaccacgcacggtgatcagcgcagcggctttgctgttggcgctgccgtcactgatgaccgcctgggccgacagctttgccgaagtgttggtgtggcggtgtgtggcggggatgttgatcccggtggtattcgccaccagcgtggcgtatatcggcgaccgctggcgtggcggtacgctgacggaagtcaccagcctgtatgtggcagggaccgtgctgggtgggttcgccgggcgtttcatcaccggcgtcgtgactgaatatgtcggctggcgcgaagcctttgaatggctggcggtgctgagcctgatggtgggtgggtttatccagtttctgttgccgatgagtcgtgtgcgctccgagaaggttcaaccctcgttctcggcggtttttagcaagcccttgctggctgcctacgccgtaggattttgcgtgctgttctcccaggttgccgcgtttacctacgcagggttgtacctcggattaccgccgttcaacctggggcctgcggcgttgggtacgctgtacatggtgttcctgctggcgctgatcgtcatccccatcgccgggcgcctcagcaaatcccggccccacgccgaactgctgagtgtggctgcgctgctgggcatcagcggctcggcgctgacgctggtgccttccttgtggtgcatcgtggtgggcctggccctcagttctaccggcgtattcctcgcgcagtcggcggccaacgcgttcaccacggcgacggcccgtgacaataaagcaggcgctgtgggggtgtacctgacgtgttactacctgggcggcagttgcggcgccattgtcccggcattgatctgggaacgctggggctgggccgggtgtgtggcgctgattatcaccttccaggtgttgaccttgctgatcgccctgaccggctggaaacccgccaaacctcaactgatcccgacgccatgaatgccatcccaccccgccgtcgcacgctgatcgccggctgctgcgcccacgccgtgcatgacggcctgaccgatgtcatctacgtgctgctgccgatctggcaaacacagttcgccttgtcctacgcccaggtcgggctgttgcgcggtgcctattccgggatgatggcggtgttccagctcatggccagccgcgctgcaaaacgctggggccgagtgccgatgctggtcggcggaaccgcgctcgccggcgcggcttacctgttggtgggccaggccaccgggctggtgatgctgttgctggcgctgctgctcggtgggctgggggcgagtagccaacacccgctggcgtcttcgatgatcagcgatgcctatgaggacggtggcggaatcaagcaggcgttgtcccagtacaacttctgcggcgacatcggcaaaaccctgatccccggcctggtgggcctgttgctcacggtgatcagttggcgcgccagtgccacgttgctggggttgctggggttggcggcggcggggttgctgtggtggcttgttccggcgcaaacatccgaatcgtcctcgaccaaaaaagccaaacctttcactggaacaggctccgtcaccggcctgcgcgcactgatcctcaccggcaccctcgacagtgctgtgcgcatgggctttctcaccttcctgccgtttctgctgcaaggcaagggggcgggcaccgccggtattggcctggccctgacactgctgtttatcggcggggcgttcggcaaattattctgcggctacttgggcgcacgcatcggcatgctgaagacggtgtggttgacggagggcagcacggcgctgctgatcgtcgcggcggtgtacctgccgctggacgggttgatggtgatgttgccggtgctggggctggtgctcaatggcacgtcttcagtgctgtacggcgcggtgcccgatctggcgccagccgagaaacgcgaacaggcgttcgccgtgttctacaccggcacgattggtggcggggcgctggcgcccgtggtgttcggcggggtgggggatgcgctgggggtgacggtggcggtgatgctgctggccggggtgttgggggtgacgttgccgttggcgtgggtgattcgcagaggaatgcaactggacggttgataactttttctgacccgaatttcagttccatcctacgtcaggatacagaaggcgaaactgtacagttcggtcttcaaaaatcgcggcgcatgtttcgcatgcctatcagtgagtgaggagtggccgttgcttgataggaagcgatcagactaagctttctatgcgccaatgacgtataggcgtgaatatgatatttatcgagtcacccgcatttacagaagatctgctagggcttctgagtgaggaaagctacggtgaattccaagcgtttttggccgaaaatcccatctccggtgatgtcattcaaggcaccaatggcttgagaaaaatccggtgggccgtgcggggaaggggaaagagcggaggcgtcagagtgatttattatcatgtctgcaaggcctatcaaatcaggttgatcttgatctaccggaagggcattaaagatgacctttcgctggcgcagagaagtgttctgagtgaaataaacagaaggtgggaatgatggagaaaaaactgttcaaccgtctggtcgaaagtttgattcagatggatgagatcgtaagtggcgagcgatctccttctcgcgaattttttgttgatgcgttgaaggtaaaagagattcgacaagccactgggctttcccaagcgggctttgcaaaggcgattgacgtgcctgtaggaacacttcagaactgggagcaagggcgacgtgagccagaagggccggctagagcattgcttcgtgccttacacaacgaccctagtcacgtattggcagcgctggagcatcgataatttccgaggttgtgccttttaagtaaatgaaaaccggctggctgaagccggtttttctgtttgagctgcctgcatcggcgtaatgccctgcgcccttttttcaagttttgcgacattgcctacaccaccttcggaacacgttgggttgtataccatggcatgggctatttatggtttctcagccgctacatcggcacttgatggcaactgcacccagggcaccctggagtgtgccggtatcccgaaagctacccggctcactcgcctgcgtgcagttgccaccctcccgaatcatcaaattcaacgcataaaaaatctatggtcacccccatttttgcaatactgattaacgggtggtgtggttggcttgcttaaatctatccggcgtctgtttggggcttgccccagcgccacgatgagagtcgcgcc

SEQ ID NO: 26 - DNA, 113317 bp, Pseudomonas nodulensis
tttgccgagatcgatcccgatcagtgctgactcgctcatgatgatggcctccgaaaacaaaacaccctgtgaaagcgtagccctcacagggtgttgggggtgaccatctcattaaccggccaccaaggaccggtttttttgcatccctcgtctgaaacaacctgacgcgaaacgagaatctgagtggagcgggtagagggaatcgaaccctcgtcggaagcttgggaagctactgttctaccattaaactatacccgctcagagcggctgactttgtaccagaagttcgccgggatttgaagtttttcttcaaaaaaatgtgtgggttacagatgtcccacacatcgacaagcgaacccattgtaggagcgagcttgctcgcgaaagactcaagagcgccgcgttctctcaggagacgagcgttatcgttgacgttcttcgcgggcaagcccgctcctacaacgggtcgtgtttcagagtgcgaaggcatgttgtgccgggccggtttgatagcgcaatcggctgacctggcgctccggtttcaagaagcccaccaccgcatcccggctgtcccggcaggctgccttgtgctccatgtccaggaaatgccccgtggcctggatcgtgctgaagctgctcttcgccacatgctggccaaacagtttggcgtcctgtgcgctggtgtactcgtcccattcgccattcaaaaacagcactggaatgtcgatctgcttggccgccttgaggtagcacaggcggtcactgttgagcacatggctgatgtgaaagtgcatctgcccatactcgtgttctgccaggctgctcacgtgcttgtagttgaagcgcttgaacaacgacggcaggtgtttgccgatggtgctgttgaccaggtggccgacgcggtcgcggtcgaggttgccgaggtagtcgacgccgcgctccaggtagtcgcgcatgggcgcgttgatcactggcgagaacgaactgatcacggctttttccacgcgacgtggccggtgggcgagggcgaccagggtggcggcaccgccccaggaaaacgacagcacatgttccgcggcaaaatggtcgatgagttccagcaggatctggccttcgacttccttcgtcagcatctgctcatggcggttatggattttggagcgaccggcgtagggctggtcgtacaaaaccacattgaactgcgggtacaggcttttcacggtttgggcgaaggatgccgtggtggccatggagccgttgaccaggatgatggtctttgcagcaacgtccgcgcgatagaactccgtgtaaacccgatactgaccctgtatatccaacacagcgatttctggcctcatgtcgtaagactcctggcaagcgggtagggcgcgcagatcactctgcacgagctttgtgacaggtaggcatacgcctggaaaaggagggcccatgtcgatccgatgacggctggccgacggctgttgttatggcgggctgtttgcctggaaggcccgtagatcaagcgcgggcggggcaaggtgtttcttggaggttataagcgactcgccagtcatagttgaactggtgatcctgattcaagcagtcgaggcggcacctcgcaaggtgacttggcggttttttgccatcaccggccgaacggtcgtcagacctgtcggatttcgtcgtcagtcagcgcccgatactggcccggcgcaagggtcgcatccagcaccagaggccccatgcgctcgcggtgcaggccgatgaccttgttatcaaagtgcccgaacatgcgcttcacctggtgataacgcccttcgatgatgctcagccgtgcggttcttggccctagcaattccaattcggcgggttgagtggtcaggtcttcgaaggcgaagtacagaccctcggcaaatgtcgttgcgtattcagggccgatagcctgttcggtctcgacgaggtacaccttgggcaacttggtctgcggttgcgtcaagcgccgcgaccattggccgtcgttggtgatcagcatcaggccggtggtgttgaaatccagacggccggcaatgtgcaattcgcctttgtccggctcatcgagtaaatccagaacggttggatgttgcggatcagaggtggcgctcacgcaacctaggggcttgtgcagcatgaagtaacgcgccggtttgcctgcctgtagcacctcgtcgtcaacgctcactcggctgaattcccgcacctcgtgatggggatcgctgacagccacgccatccaccgccacacgccgctcaaccaacagcaggcgcacttgcttgcgattgaaacgcggcaggttactgaggaaacgatccacccgcattacgtcggctcaaccctacgcaactgttcatcgacctgggcacaacgcgggcacaggcaggcctggttgcgcagttcatcgggcagggcctggagcacggccgggtcgatggtgacgctgtagcaccagcaggcctggtcgaccgtacgtgggtcagccaggctgcagtcgttgcgtgcaccgcaggcggggcaaagggtgggtgtggtcatgggctagtcgggcaaggttgcggatgattccgctaggccctgtacgatacagggccgtccccgcccaggccactcagagctggaacttgctgaccagtacgttgaacgaggtggccaggcgcgacaggtcctggctggaggcgttggtctgatgggcgccggccgccgtctgggtggacaggtcctggatgttcagcaggttgcggtccacttcgcgggcgacctgggcctgttcttccgaggccgaggcgatcaccaggttgcgttcattgatcttcgccacgctggtggtgatccgttgcagggcttcgccggcgttctgcgccagggtctgggtgttgttggcccaggtcaggctcttgttcatcgccgcgaccgcatcatcggcgccggtctgcacttcaccaatcatcttttcaatatcgaccgtggacgtctgggtgcgatgggccagtgcgcgtacttcatcggcaaccacggcaaaaccgcgaccttgctcacccgcacgcgccgcttcaatggccgcattgagtgccagcaggttggtctggtcggcgatgccacggatcacatcgatcaccttgccgatctcccgcacctgcccggcgaggtctgccaccgactgcgtggagtcgttgatctcaaccaccatcgagctcatgccggacacggcctgttccacttgctggcgaccctcttcggcctcggtggtggcctggcgcgaggcttctgaggtcgagacggcgttgctggccacttcgtccacggcggcggtcatctggttgacggcggtggccgcttgttggatttcatcgttctggcgggtcaggccacggctgctttcatcggtgaccgcactcagttcctcggcggccgacgcaagctggtcggacgcgttggcgatttccaccagagtgcttttcaagccgccttgcatatccgagagcgccatcagcagttgcccggcctcgtcggtgcgttcggtgatgatggcttgggtcaggtcaccctgggcaatacgttgtgcgctagccacggcctgggcgatggggcgggtgatcaggcgggtgatcaacatgccaatggtcaaggcgatgatgaaggccagcacaatgccgctgatcatccacgtcaacgcgctgctgcgcagttcatccgcagcggcggcgccttccttgatctggcggttattggattcgaccatcacgcggatcagctcgcgcgcctggcggaagagctcattgttggtggtattgagctgggtgcgggcctgatcgagttggccaccgtcgagcagcgccatgatgcggtctgagctgctgatgtaagtgggccagagttggtcgagtttgtcgccggctgcccgttcgtcgtcttccagcggggttgcgcggtaggtggcgtacgcggtctggctgcgcttgagttcctgggcgatatcctgacgcacacgttcgcgatcctgggcggaaacgtcaccgttgctggcgtccagcaagcggtacaggccgcggttatgggcgaccagaccgttgagggtggcggcagtggtgcttaccgagaccaggttgttggagaatgttgactccaacgccgtggagaggcgaaccacgcctttgatgcccagcaggcccacccccagggtgaccagcgcgcacaggaggaatgagagcagcagtttggttgatattttcatgagtcgggtccgggcagggtagcgaagggtgcacgctagagcctccctggctcttggcgatgtcattgtgacatcatcgcaattgacaaagttgcgagccagataaatttactgaatcgataaagcttgcgcagatgtatcaacctattacgaaaacgcaccagattccttttttgatgtcagatatttcgtcattcaatgaaagttgaatgccgccctccagcgtcgctggaggtgctcttccgcggtccaggaggccgccatgtatcgacgactgctgctcagcgctttactcggtctgaccctctctgcttgtgtgccctattacgatggaggccagagctactatcgatccgaggtctacacctcaccggcgccggcgtattactacgggggtggctcggcgtatcaataccgccgtgactactaccccgcgccgcgctattacgcaccacaaccgcgttattactcggccccgcgttattaccagccggcgccacgctactacgggccgcgtgccggttatcgggcgtacccgaaccagggctggggcggagggcattggggtaatgggggtgggcacggtcgcggttccgaccatggaggtggccgcggcggtcaccgttgatgggcctgcacggcaagcggcgcatgaagcgccgcttttttatggagaagtatcagtaatcggacaggtccgccaacgggtggcggccttcccacgccttgtcgaagtgagcctgcaccaccgcctcaggaacggtgttgatatccggccagtgccaatgcggcgtctggtctttgtcgatcaaccgcgcacgcaccccttcgctgaattcaggatgacggcagcaattgaggctcagggtgtattccatctggaacacctgggccagcgacaggtgccgggcgcgctggatctgttcccacaccagatgggcggtcagtgggcagccttcgctcaacgtcttgccggcacggcttaacagtggatcggcatgctcgctcagcaggctcaaggcgcgccaggcacaccgcacatcgcctacatccagccattcgtcgatctgcgcccggcgcggtaaccactgtgcttcgggttgctgaccggcggcttcctgcgccagcgccttgagcaggctgttgagctgcatcggggtctgttcctgccagttcagttgcagcaggccatcgagcagttcgtcctgctgatcgtcacgcaggaagcggtcggccaggcccaggtccaacgcgtcacgcccgttgatatgcgcaccggtcaggccgaggaacaacccgagcttgcccggcaggcgcgacaggaaccaactggcgccgacatccgggtacaggccgatactgatctccggcatggccagccggctgctcggcgtgacgatgcggatcgccgcactttgcaacaggcccatgccgccgcccagcacgtagccgtggccccagcagatcaccggtttcgggtaggtgtgcaggcggtaatcaaggcgatactccgccgcaaagaactgtgccgccagcgctggcacaacgcctggctgttcgcggcaagcctgcgccaggctgcgcacttcgccaccggcgcaaaacgccttggggccgttgccgcgcagcagcacgcagacgatgttcgggtctttggcccaggtgtctaggcgttcgctcaacgcgaggatcatcgggtgggaaagggcattgagggacttttcagcgtcgaggctggcgatgccgatgcgggcgccgtcgctgccggtcagctcttcgaagtgcaggttcatcgtgacctcaatcgagaaggtgaaggatgagtatgatcgcttcgcaggaaaatgcgggtggtgtgtcagatcaattgacaagcggggtcggctttcctagggttcgcctcattctttttgacaagactattcaaccatgaccgaagacgaccgtatcaaactcgaacccagctggaaacacgccctgcgggatcagttcgagctgccgtacatggcccagttgcgcgagttcctgcgccaggaacatgccgccggcaaagagatctacccgcccggcccgctgattttcaacgcgctcaactccacaccgctggacaaggtcaaggtggtgatcctcggccaggacccgtaccacggccccggccaggcccacggcttgtgcttctcggtgcaaccgggcatcccgacgccgccatcgctgctcaatatctataaagagctcaagcgcgacctgaacatcgacatccccaaccatggctacctgcaaagctgggccgaccagggcgtgctgatgctcaataccaccatgaccgtcgaacgtgccaacgccaacgcccatgcgggcaagggctggcagttctttaccgatcggattatcgaagtggtcagcgagcatcagccgcacttggtgttcctgctgtggggtgcccatgcccagggcaagcagaagctgatcgacgcgaccaagcacctggtgttgacgtcggtgcacccgtcgccgttgtcggcgtatcgcgggtttttggggtgtgggcatttcagccggaccaacaagtttcttgagcagaacggcgagacgccgatcgagtggcggttaccgccggtctgattgaaaagggcggtgcaatgccgcctgtaccgcgtctactcgttgtttcgacacgggcctcacttttttgcatgcttcagagcgcaggggtacctgttagttctgacagtattcatggtcagttcaagcgcattaactactcttctcggccgtgggggctggtgcataccagctcttggtcgacggcggcttactgctgattaccaaggagattagatatgactagacccactgtaacgactccaatgctcgctcgagccagggctcctggggttcttgaagcagatgccccggtggcgccggatgcgttgcccctgtgggctgacgatgttggtttcaagatcccggtgccctttcaaagtacggggttgccagtccaggtacccaccctgtggggtgggactggcgttctgttccctggcgatataactgccgttgtctggtactgggatggcgtaccgtttgacaccaagcgggtggaggcaccttacgatgccaccgacttacctctcgttgacgcggtggtaccgccccatctgatggatgccgctggcttgcataacttgcactatgaagtgttgcttagggaaagcagtgggaaccccggcgagccgtcttttgtaaccgtgctggacagcgacaaggtcgggcccaatcaggggcagcgtggcccacggctgcgatttccacctgaaattgaacaagacggtgtcactgatgattacctgaatgaccccgccaataacgaccaggtggtgggcaccgtcgtttccactactacgcctgcctggctggacatgcgattaggcgatgttgttgaagcctacctggctcttttgcctttgcgtcggcccttgcgcaggcatccacggcaacaggatattgttgccacaaccaccatcacccaagcacacaaagatggagcgcccgttgaggtgattttccccggggacgtcctgcgtggtctggcgtccaatcgagagtacaacgcacactactggctgcgagaccgggcaggtcgcgaatcgggtccgtcatttaccagcgtgttgtatatcaatttggcagtaacacctactgagctgcgcccggtcgatctgcctcagttgaacgacggacgtatcacactaagcgatgcccgcgagcccggtggtgtgttcatgaatattcttgaaatattcggctctgcgccgggggacattctgcgtcctctctggaactttattcctctgcctgaaattgagattgcggctattcaggcttggcccatccgcgtgccaatcccgtattctgtcctcgccacaggtggttttgaggtgacgccggggacgattcgggcgggttatacatgggagcgaggatcggcgacgcccagggactcgcaacctcgatttgtccctgtcaacttgacggttgccggccaagtcagcccagacaatccggacccgatcaaccgcttgctggagaccgtcacggtcaaggggcgagacggcgacaacctgctgaccctcaatgacgtgggcctccctgttcgggtcgtgaccttgttgttcgacgagcctaatgccaacgaaaccttggagctgatggtaggtaaccatccggtaccgttggccacctataccgtgcagctcaccgacgtcgccgggcaggagatcgagttttttgtcgactgggctgatttggcacccattgttggtaacggcggcatcttcgcgttcttctattggacctttaacggagtgaaccgccagcgtgccgaggacaccccggtgattgtcaacattgtgcccatcgtcgggttgcaggacctggagtacgttggcgtcacctatggaccggggcctgatgcagggtttatcagttgcccattgaggccttgggttaacggtgtaggtgtcttcattccgggggacgctagcttgctggaaggcggtgacgaagtggttctcgagtgggccagttacgcaaaccccaacggtcatccgagtggcgtcatgcccgaaacgattaacacattttcccatacgttgagtcccgcagaggctcgggatggttatgagttcagggttcccttcgacccctacatcctgcatccagggttggtgcaaccacctaccgggcaaacaaatcctagacatggttcagccatagcgcggtaccgggtgatgaaacccgcaggaggcgggatggggtggtctcctcgcaggttggtggccattaagttgatccgcctaaatggccttccgccttgcacttcggatgattgaagccgcgcgcacgggcgttacacccgtgcgcgattcaaacgctcggcacctgtcaagtttgacagttacgggtgatcgaaaactcacatttaatggacacgagatcagcaggttcgcaagaccaggtagttgtcggtcgtagttcgttcttcccgatagacggcccggggtgaccggggtgaaaacttgttcctaccaggagtgtgcaccatgtccaacaagccccaaaacatcatcaataaaaaaacgtccgcacaaccgcagtttcccacggaagattgggaagaccccgtcattgatcccacacttgagcctgcccctttgatcgacgggttgttacccgctattcctggggactcacataggaatattgtggacagggacatgcaactgcggggcgtggtgctgtccctccggctgtgggatcggagtggctttctcaatgactttgaaacactcaccatatacgtcaacgaaaggcctatcgagatcatgacctatgaccacaccgacgatctgacagaccctgtgacggtggatctggggcctaaatccgcgttgcagactcatggcatcaaggacatccgggtgcatgtaatcaatttcggtggcaatgacgttaactacaacattcgccgggtctatgtggatgcgcaggaccctaactacaacaaccaacctaatttgatcagactggaagattacggttcggaactgactcctgctgacttggagggaaaagacggtcttgaattcactattcctgatcctgccgatcgtcgcgggggagatatttatagggtttatgtcgggacgatcgaacaccccttggagaatagcgttccgctgaccggagacattgtggggaccattcccaccacgatgatcctggcaaagtcaggcgaaatccccgtgcagtacagcctggaggatcgttctggtaacatctccgtcctctcccttccggcttatgtgcgggtcagtctcaacgatccaccggacttcggtgatgtcaaggtgctggaagagcccctggtcgataaagaggaagcccgcaacggtgcgacggtgcaactggaaaacctcaccggctatctgccgtctgatatcttggtggttcgctggggaacggttgagatctaccggcaagccctcggcatggccatcttcccgctggacattcccgcgccgtttgcggccattgcggcgggcggggaattttacactgcggacattaaactcactgttgaacgccaggacggtagcacttacccagggccagacacgcaggtagacgtcgacctgcgtgagccgggcgtcaccaacccgggcgaaggcccggtagaccccaacctggccaagcctgatctgattggcggagggccgctgccaaggccactcaaccgtctttcggaaaaggaccgtggatttgatgccaccgcaaccttcttgttgccacccggcctggaggcaggtgatttcattgactttgtctatgcgggcattgttgtcgccacctatcctgtgacaggggccgaagccccagactttatcgtgacggttaccgtggactgggttgatatcggtgagacggggaacggtactattccccttttctgcctcatccgtgatgcggtcaattacaaacattcgccacatcaagacgtcttcgtggacatcttcaatctggaggggctggccgatgcgatctttagtaacgcccagcctgttaccggccagacgaacttcagctactacatcaattgcacaagaagtccttggctagatgtgcccatcaaggtcctggattctggattgctccagatcgacgatgaagtgatgattgaggcggtcaggtatgcgtatgtcccacctactgcaccgatcggtgtgcctgtcggtacgcccatagagagtgcgtggttcacactcaacagttccgatgtcaatcttggtctggttgtgccaatggatttgagtgcctggttcgaagaccacacgggtacttcagggcgaggctatgttggcgtgcgctggaaacttcatcgcccctcgacagaagatcggggcatctccgatgaggtcagggcggcctgggacctcgtcggtactggcggtggtgtgccgggtagttgcgttccgggggcgtcacgtcgtaacggtacgctttgaagcaacgttgaagcctcatcctttctgattgaaagggtgaggcttttttgtgtaatgacctttagtcgctacccgcgtgaccttaaggaaagtcctacagggcttgggaggtcaggtctttagtctctgcgccgaagaaaacggaaacctattcgatacggggtccggattcgaactggtatttacttctgaggctacttggcatgacttctattacttcccatcgttttcgcttgtcgcgtttatcgtcaatcatcaaactcatggcggttgccccgctctacttactgagcgagcaagcactctccgcggtcgtcgtagacggtaacgtcggtagcggcaaacatgacgtctatcccggtataggcgctaccgattacattgcccagaacggtgcgacgctcactgtccacgacggcgcgacggtcaaggaaatccgtgctacgaccggctccaatctgaccatgaccggtgccaccgtgacctcggcacacgcctcccaggcggcgattaccctggccaactcgaacgcagtcatcaccggcacaaagattaccagccatttcagcggcggcttgaacgtggctcgccagccgggcacgacgactggttcctacgcacaggtcaatggcagcgaagtcatcggtgcgacctggggagccaacgtcacctcccatagcctgctggaattgaataactctacgttgacagggcaaagccggcagggcctggtgctgcaggggggcgcggcgattgcaaccggcagtgaaattacaggggctaccagtggtgtggtaatgacgggtgagagcctgagcgtgcctgcgacgcctcaattgaccctggacggttcgcgggtggttgggctcaatggtccggcaatcagcgtagagcgaccgttcactgctgaaatcgacgtgcgcaatggctccaccctggtcggcggcaacggcaacatgctcgagctgacgggtggcggcaacgccaacatgcgcgtcaacaacagcgccctgaccggcaacatccaagtgggcaccggcagcgccctggacctgagcctcgaccacgccatcatgaacggcgacgtgatcaacaacggcggcagcgccagcgttggcctgagcaacggctcgatcctcactggccgtctggagaacgtcgacaagctggcgatcaacagcgacgcgacctgggtgatggtcgacaaccagcaagtgggcgacctggccctgagcggcggtaacgtcaagtttggcgacccgggcgtgttctaccaactggacgtggaaaacctgtcgggcaacggcaccttcatcatgacggcggatttctccacgttgaccggtgacttccttaacgtcaccgggacgtcgtcgggtgatcacaaactgctgatcgccagcagcggtgccgacccgttgagcgatgaccgcctgcacgtggtgcacaccgccgatggcggcgccaagttcagcctgctgggtgaccgtgtggacgtgggcacatactcctacagcctggtcaacgacaacgaaggcaaagactggctgctggacccgggcagcaaggtgatcagcccgagcacccactccgtactggccctggccaacgcggcgccgagcgtgctctacggtgaaatgaccaacctgcgtacccgaatgggtgagttgcgccacagcgatggtaagtccagcggcttgtggagccgtacgtacggcaacaagtttgaagtgaacaaccgcgataaaggtgtgcagtacaaccaggtacagcgtggttttaccctgggtgccgacgtaccgttgtccggtggcgacggccaatggctggcaggcttcctggccggtcacagcacctccgacctagacctgaaccgtggcagcaaagccaccgtcaacagttactacgccggtggttacgccacctggctggacgctgaaagcggcttctacttcgacggcgtgctcaagttcaaccgcttgcacaatgagtccaacgtggcgatgagcgacggcaggaaagccaagggcaactacacgcaaaacgcagtgactgcttcggcagaggtgggccgccacatcaagctggacgacggcttcttcgtggaaccttacggccagttggccacggcgatcatccagcgccagagctacgagctggataacggcctgcaagccaagggcgcgcgtaccgcttcggtggtgggcaaggccggtgtgaccgccggacgtgacatccagctggacggtggcagtgtattgcagccgtacttgcggactgccgttgcccatgagttcaaccagagcaacaaggtgtcggtgaacggcaatagcttcaacaacgacctgtcgggcactcgggttgaaatggcagctggtctggccatggccgtgtcgaagaactggaaggtccatgccgatgtagagcgcagcatgggcaagagcgttgaccagccgtggggggttaatgtgggggtgcggtatgacttctaagagtgcataaactcacacctaataaaaaagccccgtatctttgatacggggcttttttacggttatggaacgggtcgaatgttcaagagcgttgtggtttagcgacctgcgttattagaaaacgatagcattgatatacgcaccgtcagctgtatgggtttcgtatcccaaaccctcgccactcggtaaaaagacgctgtagtgagagtcgtcatcccttttatgaattgtccaggtatgagtgcttattggaaatgcggaaccgaatcttgaacgtaacgagctgagttgactcattgtgagcaattgcccgctgacattcgcggtcccccattgagtgttaataaaatgccggacagtctggtatgaccccgataccctaattccataggtggctgtctgcatcggttgtgatcggtctgtcacagtgatgatggcggtgcctgcagagttgatattgacctgtcctgttgagctattcactgttactgcactggaactactgcgatagaaataaggcggtgtgccgccagtggcttggcgtgttgacggcagataagcacgctcgttgttgggaaagccggtccctagcagccatcccccaagattaacgtcccttgtgtcgtttggaatggtcaatgcagggaccgaactcagcgtgtaggtcctaggattcaacgctatcgcttcgctctcaaggccagtcccattcaagacaaccttggccctaacagtcagggagctgccattgggttttgtcttgaggtaatcgcctgggatcaggtccagagtacggcccgctgtaaactcgggtgcggtgacaaccaggccgtcacgcaacgtcaggtcgccggctgtgtgttccagttcaatgaataccggttgtcccgccttgaagaatggccatgggtcgattttcacgttgttggcagtgttcacgttaattgaagtgccattcgcctcaggtactgaaacgatgtccagcgtactagatggtaatgccgtgaccctgagcgtcaggatggctgacgaaacagggttgccattgcgcataaccgtgaaaaacacctggcagaaactccccaggtaagcggccacgaaatcactcaggatggggaaagaaatgtaatccacacctgcgtcaggcacaccaggtttggacgggatgacgggttcgcccaggccaggcatacccacaatatgaacagttacatcatcggtgggtaacaagtcggtagcaggcacctggatggtgacgatgatgggcgacggcggccttacatgcagtgggttcagctcggcttcggtaggcgaaatgaccgtcgcctccagcaccttgggtggcgtagggagcttcaacgccatgccgacattgataaccaggtcttgtgaaaacagagtagcggcgcctggtgcgggaatgacttcgtaaaacaacctcattgtactgttcaggttggcgagtacgatcagtcgtgggatggtaaacggcaggactgaatcctcccagttgatgtctacgttgaaccaggtgcttgcaaagctgccgcctggctgactgcctataccgagcaaccgtacctgggctccttcgacaatcaccgggtgggggttgatgcgaacattcaggtttgccaggctgatggcggggtcaaacgtgaggttgggaagtgttgcctgcaatgtccacggcggcggcagtatcgcttgtgcattaccgaccggtacagtgaccgacttcgatgcgggtcgctgggcagcgccattgatctcgtagtacgcaacgaagtagccaccgttcagtgcggcgaagaaggggttgtccaagaggaacgtcagatcgccagtgccggccatgtctgtaaacgtcgcgtacacctgtcttccatcagccgtcaggcccgtcacgatgaggtcaacgcggtcattcggtaactggccgaaataacgcggaaccacaattctcaccgggttggtatcggctggtaaggcaccctcgtcgaggtcccacacgatcggagctttaagaccgtcctcaacgggttcaccatcgatagcgtacaacacaccttctgacgggcgatcagcgacgcctggtcgaacccgtttgtaggtgatcagaatcagtccgcccgatagcagcaagagaaaatccagcgccaagggaatgtacacacggatcggtgtgatcacggtgactggatactcgatgatcttttcggaggtggtgccatctgcggcaagccctctaaccgtaatgatcaccgtatcgccgacgaggtagccttggttacggatcagcagttccagcggcgtatcgactacaagatgtcgcgtgtcgataaagtccagatcgcgtactgggtcgtaatcggattcggatgcaaataacgctttcagcagcggctcggtcgaagcaccggagtccacttgtatcagccgaggcggtgaggccccgggggaggggttgccgaccttgtccagcacattccactcgaccaaacgaacgccgtcgggtaccaggctccaggtaccgaaatagatggtgaatctgatgggggcagtgcctgctgcttcaaaagcagtgaccgtatggctgaccgttactccgccgatgctcaccgtgatgacatcatgttccttgcgccagtgaacttgcggcaatgacctgtccagcgggtagttggcgatttctacctcggtaccgagctgcatctgagcctgagtaacgagaccaaaattttcgatcaacgggtcggtaaacttcaacactgccatgttttcgttgtagggcttgccgaaggtaggaaatgggctgaccggtagttggcgatcaacgaaaatattaaagagcttggacggatcggcgttgccaccaagcggcgttacaaaagcctgtatcgtattgtttgcctggtcgataaaacgactgctattgatgaacaggacaatcggcttgccattggtggcttcatcgtcggtgacggtgtggaacgcaacttgtgtcccgttgaccctgaggctgatgaaatcgagctcggcttggcccaggtatgcatttacgatgcagatcacaccaaattggttgactatcaaggccgcagcattgagcccaccgtcgtggcccggaacagggttccagagtgtggggaggtacaagggcagcacgctgaagggcgtattgataaaagccttgtcattcaagatcgccccggcgggcggtggagacgtgaagccttcacgtcgatacaggttaggtggcagcccacccgacacttggctacggactgtggcgagttggtttcttgctccgctgcgagagctcgcagtcaaggctggaacactggattcgtcatcattactgggttcagggttttggtcgtaggtcatgatcggcatcctgttagatagaatcgacgcgatctgaagcccgatggggcgtcgacagtcgcaggctcgattcaacgcccgcggtcgctggccgactagctgtgaaaaatgacagtgccgacgagtggcactaactagctatagcagcacgagggccactgtttcagagcacatgtttgccacatgctcgttggacgtggcccaaaactgcacgcttatcatgggcatggacttctccacgctctaatgtttgattttgagtcgacctcataactgaatgggccgactgttcgaaatcatttccgtacgaatgcgtacactacaagacagtcaacacaagcagagacgcggagtcggcagaccacgtgccccagtctgtgccctgaccgcctggcataaaaacactgtggtaaacatcgggctgatctttttgtgggtggacagtccaggccagaccatttacagggaatccagggccgaatcttgaaaccagcgagatgaattgatcgattgtgagcaattgcccgctttcattcgcgtccttccagttcatggaaccaaggtactcgagggtctggtgctccccggttacctgaatttcatagctggctgtctgcggcggctgcgactggtctttcaccgtgatgatggcggtgccctcggagttgatattgacttgtcctgtcgaggcattcacctatacggcgctggaattactggagtattcataacgcgggttaccgccagtggcgacgcgtgttgacgggagataagcacgctcgttgttggggaatcctttcgccagcagccaaccgtcaagttcaattacccttgtatcgcctggaatggtcaattctgacaattcctgagcattaccgggtttagcgttttgatcgtcagtcatgatcggcatcctgttagttggatagaatcgacgcgacctgacgcccgatggggcgccgacagtcgcaggctcgattcaacgcccgttggcgttggcccactagctgtgaagtttgacagtgccgacaagcggtaatgaggaggcggagcgtgccatcgcgcaagagttaagacgggcgattccaatgcctgaacaacggctccgccagaaacaacacaaacaacaagcgcatcacctgcatcgccgtcaccagtggcaccgacagttgcagggtctcggcggtcaggctcatctcggcaatgccaccgggcatcatgcccagggtcaatgagcgcaggtccaggtgtgtcaacgcactcagccccacggccgccaacgtcgccagcgccatggtcaacgcggtgccgatcaaggtacggcccatgaacgacggcgcccgacgaaagaactgccggttgaagtggcaacccaggccactgccgatcaaccactggccaatctggctgccgccatcgggcaggccgatatgcaaatcccacacgacgctggccgtggcactcaccagcaacggcccgaataaccaagggttcggctggcgcaagcgctgccaaccccaggcgaccaaggcgcccagcggaaacagcgccagcagccacggccagctcaccggcgccgggtgaaactgcggtgtaccaccttcgagcaagtacttgaagatcgccggcacacacaacaccaccatcagcacccgcaggctctggcccgccgcgacacggctcaacaccgcgccattgcgtgcgccgaggttgaccatctcaccggaaccacccggcatgctcgaaaaaaacgccgtggcgcggtcttcaccgctacggcgcatcaaccacacacccaccacgctcgacaggctggtgaccagtgcgccgaagaagatcagcccgaagtgactcatcacctgttcgatcaccaccggggtgaagtgcaggccgatgccgatgcccaccacccattggccgcatttgcgcccaccgggaatctccgccaactgccacggcgtaaggcaacgcaccaggatgatcgccagcagcgagccgaccatgtacggcaacggccagccgaccaggctggccaggaaaccgccggccaggccgaccagcggtgtgccccaccaatgtttaaaggtgacctcagacatcggccacggcacgacgctgcagggcacgtttacggtagatacgcagcagtggcacaaacagcatgatcgcggtcagtacccacacgccaaaggtgatcgggctcgaccacaggatctccagcgcaccgttggagatcgacagcgcacggcgcaggttctgttccatcaggccgccaaggataaagcccagcagcaccggcgacagcgggaagtcgagcttgcgcaggatgtagccgaagatgccgatacccaccatcaggaacaggtcgaaggtggtggcgtgcaccgcgtacaccccgatggcggtgatgatcgcgatcaccggcaccagcgcccagttcggcacggcgaggatacgcgtgaagatgcggatcatcgggatgttgaggatcaccagcatgatgttggcgatgaacaacgaggcgataaggccccagacaatgtccggttgctgttggaacagcagcgggcctggggtgatgttgtacagcgacagtgcgccgatcatcaccgccgtggtgcccgagccgggaacgccgagggtcagcatcggcaccagcgcaccgcaggcggacgcgccaatcgctgtttccggagcggcaaggccgcgcatgtcgccctggccgaatttaccgctggcaccggccaggcgtttttcggtcatgtaggcaacggccgacgccaacgtggcacctgcaccgggcagtacgcccatgatgaaaccgagcaggccgcaacggatattcaccacgaacaccgcgcccgcttccttcaggttgaacatcatgcgcccggtggctttgaccgcttcctggccacggtgggttttttccagcagcaacaaaatctcgctgatggagaacagacccagcaccagcaccacgaactggatgccgtcggtaaggtggatgttgtcgccggtgaagcgatacacaccgctgttggcgtcgatcccaaccgccgacaggaacaggccgatcagcgccgctacaaatgtcttcagcggtttgtccccggccatgccgccgaggcagacaatcgcgaacaccatcagtacgaaatattccgccgggccgaaggcaatcgcccatttggccagcagcggcgcaaacagcaccatgccgcaggtggcgatgaacgcgccgatgaacgaactccatgccgacaaagacagcgccacgcccgccaggcctttgcgggccatcgggtagccgtcgagggtggtcatcacggtggaggcttcgcccgggatgttcagcaggatcgagctgatgcgcccgccgtattcgcagcccaggtacacggctgccagcaggatcagcgccgattccggcggcaggcccagggcgaaggcaatggggatcaacagcgccacgccgttgatcgggcccaggcccggcaacaggccgaccacggtgccgatcaaggtgccgcacagcgcggtcaccaggttgtaaggggacagtgcaacgccgaaaccctggcccaagtagccgaaagtatccatatcagttctccagaacgtcgagcaggccgaggggcagcggcacatccatggctttatcgaacaacaggtaaagaccaatcgccatcaggctgacgatcaccacgctgggcaaccagcggccgccatacaggcgcgccatcgggatgccgatcagcatgctgctgaggatgaaacccaggggttcgaaggtgccggcgaacacgatcaacagcgcgacgcacacgccgatcttgatcagggtttcgcggtccagcgcgggttcttcttcggtgtgtttggtcggttgtggacgaaacagcatgtagatcagtgccaggctcatcagcccgagcatcagcagcgggtaggcgcgcggccctaccggctcgtaggaaaacgacgcctgatacggccaggccatcagcgcgaggccggcacaggccagcagcagcgcggcggcgaaaatgcgttgtaagagcatgtggaactcctgggccacgccgcttggctaaagggcgtggccacacaaaagaggggcgattactggatcaggccgaactctttggccagcactttgtagtcagccacttgtttcttcacgtaggtgtccagctccgggccggtcatggcgaacgggaacagctcacgctggtcacgcagcttggcgaactcctcggaggccagcagtttgtcgaaggcgtctttccaccaggcgtagtcggcatcgctgacttttggcccgaggtagaagccacgcaccactggccagacgatgtcgtagccttgctctttggcggttgggatgttcttcatttccggctcgtccagacgctgttcggagaacaccgccagcaggcgcatgtcgccgctcaggatgtgcggcatggagtcggagatgtcggtactgcccacctggatatggccgccgagcagggcggtggcgatttcaccgccgccttcaagggcgacataacgcagttcgcgcgggttgatcccggcggccttggcaatgagcgcggtttgcatccagtcctggctgccgacggtgccgccggaaccgatcaccacgctgcccggatctttcttcaaggctttgaccagatcgtcgagggtcttgtagggcgaatcggctttcaccgcgatggcaccgtagctggtgccgaccgctgccaaccagcgcacggcgctttcatcgaagcgaccgaacttgccttgggccaggttcaacagcgaaccgctggaccaggccaccagcgtgccgccgtccgcagggcgctgtgcaaccacggcgttgtaagccaccgcgcccacgccgccgggcatgtaggtcacgcgcatcggcttgctcaacagcttctcgttgaccagcgcgctttgcgccagtttgcaggtcaggtcaaaaccaccgcccggcgaggccggggcgatgcactccgggcgcttgggttcgtcagcggccagcagttggccggcgaacagcatgcagccggcggcgagggccagtttacgcagtgaaagggtcatggttatctccgtctttgttgttatgaggggttactaccagagcgcaacgctgtagctgaccagcagacgcacttcatctgcgtcacgggccgagtagttggagcggtacgtggcgttgcgcaggcgcacggccacatccttgaacgtgccggcttgcaccacatacttgatctcggtgttgcgctcccactccttgccggtctcgccgttcttgagcttgatgttgtcacccgacaggtaacggctcatgaagctcaggccgggaatgcccagcttggcgaagtcgtagtcgtagcgcgcctgccaggaacgctcttcggcgccggcaaagtcgttgatctgcacgaagttgaccaggtacgggtcgctgccatccacataggggaaggcgctgtcgccggacatgtgctggtaaccggcgctgagcttgtggccgttgagggcatagctgaacaggccgttgagggaggtgttgtcgatcttgccgccacgggcggcgccggtgtcatcgctgatggccaggcgcaggtcggtgccaaacgtgccaggacccatcgggcgcgaggcgaccaggccgaggaagtgctggcggtacacgtcgtcgagttgggcgaagtggtagctgccggtgatcttgtcagcgaacttgtagtcggccccgccgaaattgaagtgtttgccggtggcgccgctgacgaagcggctgttcttgttgttgagggcgatgtcttcgtaattggtgtcgtcgcggtccttggctttgtccaggcgcccgccggtgaacaccaggttcttgaattccttggaggtgatcaggccaccgttgaaggtctgcggcaggatacgcccgtcattgggcttgaggatcggcagctcggggatcaacgagccgatcttcagctcggtggccgagatcttcactttgccggtcaggcccagcttggagtattcgttggcggcgcggccatcatcatgggtaggcaacaggccggtgccggtgcggtcggggctggagtcgagcttgaccccgagcatgcccagcgcatccacgccgaagccgacggtgccgtcggtgtagcccgattgcaggttgagcatgaagccctgggcccattcgtcgcgcttggattgctgggcgctggtgccgtcgcggaagtcgcggttgaagtacatgttgcgggtttccagggtcgcgctactgtcttcgaagaaggccgcctggctaagcggcgaaaagccggcaagggtagcagcactggcgagggcggtctgggtcaggcgagaaaaacgaacaggcgaggggacctggggctgtgtcgacagcatcgttgtgtactccgttattgttcttattttggcgaaaacgcgtcgaggcgtttttcgggcgctgcggttaaggcagctcggcgggcatagaccaccgtggctggatgctaaagggcgaagctttcactaacctttcagtcggctttcaatgttttcgggcttcacaggccggtcggcgcctgtaaactgcccgccaaagcgtggcgccgaccacccctgaatgaggtagtaatccatgcgtgtcttgctggttgaagaccatctgcaactcgccgaaagtgtcgcgcaagcgctcaagagcacgggtttgaccgttgacgtgctgcacgacggcgtggcggcggacctggccctgagcagcgaggagtacgcggcggcgatcctcgatgtggggctgccgcgcatggacggtttcgaggtgcttgcgcggttacgcgcccgtggcaaaaacctgccggtgctgatgttgaccgcgcgcagcgatgtgaaagaccgcgtgcacggcctcaacctgggggcggacgactacctcgccaaaccgttcgaactgacggagttggaggcgcgggtcaaggcgctgctgcgccgcagcgtgttgggtggtgagcgtcagcaggcctgcggcgtgctggtgtacgacctcgatacgcgacgcttcacggtcgggggagagttgatgacgctcacctcccgcgagcaagccgtgcttgaggcgctgattgcccgtccgggtcgggtgatgagcaaggagcaactggcttcccaggtgttcggcctggacgaagaggccagccccgacgccatcgaaatctacgtgcaccgcttgcgcaagaaactcgatggccagcccatcgccatcgtcaccttccgcggcctcggctatttgctggaagcccgcgatgcataagcccagcagcctacgctggcgcctgttgtggaacctggcgctgttgctggtgctgttgatgctggccagtggcatgagcgcctactggaacggtcgcgaggccgccgacaccgcctacgaccgcacgctgctggcctcggcgcgtaccatcgccgccggcttgacccaggtggacggcaccctgagcgccaacgtgccctacgtggccctggacacctttgcctacgacagtgccgggcgcatttactaccaggtcaatgacatcgaccagaaactgatctccggctacgaaaaccttcccggcccaccgccgggtacgccacgcaccgatgactatccggcactggcacgcttttacgacgccatctaccagggccagcaggtgcgggtggtgagtctgctcaaggcggtgtccgaaccgaacatgaacggcatggccgaaatccgtgtcgccgaaaccgatgaagcacgcgtgagcatggctcgcagcctgatggccgacaccttgctgcgcctgggcatgctcgccgtgggcgcgttgttgctggtgtggttcgccgtgagcgcggcgttgcgcccactggagcgtttgcgtacggcagtggaagaacgccagcctgacgacctgcggcccttgccgttggtggaagtgcagcatgagttcggcccattggtgcgttccctcaaccatttcaccgaacgcctgcgcggccagttcgagcgccaggcgcagtttattgccgatgcggcccatgagttgcgtacgccactggccgcgctcaaggcccgactggaactgggcctgcgcgccgaggaccccgccacctggcgcagcaccctcgaaaccgcagcccagggcactgaccgcctgacccacctggccaatcaactgttgtccctggcacgcatcgaaaatggtgcccgcgccattgccgaaggcggcgcgcagttgctcgacctcagccagttggcccgtgagctgggcatggccatggcaccgctggcccacgcacgcggcgtggcattggcgctggaagccgatgagccggtgtggctgcgcggggagccaaccctgttgaacgagttgttgagcaacctggtggacaacgccctggcgcacacgccaccgggtggcaatgtgattctgcgggtcacggcgccggcggtactggaagtggaagacgatgggccgggcatcccgctggatgagcgggaccgggtgttcgagcgtttctaccggcgtagccagcagggtatgggctccggcctggggctggcgatcgtcggcgaaatctgccgggcgcacctggcacagatcagcctgcacgatggcgagcaggccgggctgaaagtgcgggtgagttttatcgcgggttgatcagtagaacatcgagcgggcttcatccagctcggtgcgcaaggcgtcgctgtaagggtcgacccgcagtttctgcatggccggcaagctggaaaccgggacgctggccaaggggtgatcggtgccgcgatggcaatacagcacggcgacctgcaccaggtcgatgtagtcgaggcgcgctgaatcgcgttccaggtccaggtattggccaggcagtttcgccagcatttccggaaagtcccagccgcccagcagtttgtcgcccagcagtgggtggatgctctcgatgacgtggttgaggctgaccgggtcggcgagcagctcgtagtggtcttcggcgtaggtcaggatcggcagcacaccgatctggtgcaccaggccgccgagggccgcctggtccggcttgagttgtgtgtggctgcggcacagggcataactcacacccgcgacctccaggctgcggcgccacacatcacgcatcttttgttcgaccacgtcggaacgcgcgtggaagatctgctccatgaccaggccgatcgccaggttgctgctgtagttggtgcctaatcgggtgatggcggtgtgcaggtcggtgacttcctgggtcgcacgcaacaacgggctgttgaccactttgatcaggcgcgccgacagcgcggtgtcgcgaccgatcactttgctcaagtggctgatgctgatctccgggtcttctgcggcctgacgaatattcagggccacttccggcaatgtcggcagaaccaggtcatcgttatcgatggccctcaccaaagcctgttggactttttccgccagcttgttcattcatgctctctagggtgttgcaagaaggtacggcgattaacgctggatctctcgatcgcggtcgagggtgtaaggcaggtcgagcagtcgcaagcctggaccttccagtgtgcccagatgcacatcgccactctcggcagcttcggcttgcaacacggccagaagttcaacgctctggtcagcttttgcggcgatcaccacttcgccgatcgagctgttatggctgggagaaaacagctgagtgcctggctcgggcatttccggcgcattgaggctcaaacggtacaggcgacgtttgagtttgcccaggtactgcatgcgcgcgacgatttcctggccggtgtaacagcctttcttgaagctcacgccgcccacggcctgcaggttgagcatctgcgggatgaacagctcgcgggtctggggcatgacctggccgatgccagcgcggatttgacccagcagccattcattcaggtcggtttctttgagattcgcagccaattgagggcgtataacgttggcgtgctcggcaggcacccaaagttcagcgcgatcaggggagacgcggatggcaatcaacgtatcgctgcgggcgacgctgtcggtctctgccgacagctcaaggccaaggcttatgagggcttgatccccattgaccaggccaaagcgcacccaggcggcgctttcatcggtgagtttggacttggagaacacggcgtatttcttcaggtcggccagttgcggctccagcagctcgctggccatggccagcaacacaccgtcaccttgcagcaggatgcggaagctcgactgcatgcgccctttttgcgtgcagcgcgcgccgaggctggcctgggtgtcgctcaggtaattgaggttgcaggtcagttggccctgaaggaatttggcagcgtcggcgccgcggacggcgagaacgccttcgtgggacagggggcagaagaaagcagagtcagccatgggtcatcgcaggtcaaaaagtcatgggtgcatcatagaggggcgcccggcaaatggatagtttccgtatggggcgaccaaagccgactgttccggtgccgtcgggtctgtatacttgccgcctatttgaggagcgctccatggtcgaagatgtagaaatcaatcgcctctactggcacagccgtcgcggtatgctggagttggatgtgttgctggtgcctttcaccaaggaggtctacgcgacgctcaatcaagtggatcgcgacctctatgtccgcctgctgacgtgcgaagaccaggacatgttcggctggttcatggaacgcgccgagtcggaagacccggagctgcagcgcatggtccggatgatcctggatcgtgtccagcccaagtaatagctttgaatgccgctggcaggcctcacggctgttgctggcggcctatctccttgcccagctgtttgcgctgggcgccttgatgttcgtgcaacttcctttttcgagccttggcatgctggtgtgcctggcgcacgccgcctgggttttgccacgcgctgtcctgttgactcaccgttcgtcgattggtggcctgcgccgcgatgcagacggctggcagctgtggagtgccgcgcggggctggcacagcgtgcagttgcgtcgcgatagcctggcgttgccgttgatcgtggtgctgcgttatcgggtgcagggcgaacggcgggtacgttcggtctgtgtgccgagggattcgcaggccgccgatgtgcaccggcgcctgcgtgtacgcctgaagttcagccgccgtaggtggttggcaccaggatagtgtcgcgggcctcgggcagcatctgcggatagtcgagggtgtaatgcaggcctcggctctccttgcgctccatggccgagcggatcatcaattcggcgacctgggccaggttgcgcagctcgatgaggtcgcggctgactttgtagttgctgtagaactcgtcgatctcgtccagcagcagccttacgcgatgttgcgcgcgttgcaggcgcttgttggtgcgcacgatccccacgtagtcccacatgaagcggcgcagctcgtcccagttatgcgcgatgatcacgtcttcgtccgagtcggtcacctggctggcatcccagcggggcagggcggttggcaccggaatacggggcaattgttcgagtatgtccgccgccgcagagcgtgcgtagacgaagcattcgagcagcgagttactggccatgcggttggcgccgtgcaggccggtgaagctggtttcgccaatcgcgtacagacccggtacgtcggtgcgaccgtgctggtcgaccatcacgccgccgcaggtgtagtgcgcagccggcaccactgggatcgggcctttggtgatgtcgatgttgaaggccaggcagcgctcatagacggtggggaagtgggtcttgatgaaggcttcgggtttgtggctgatgtcgagatacacacagtcgatacccaggcgcttcatctcatggtcgatggcgcgggcgacgatatcgcgcggggccagttcggcgcgagggtcgaagcgctgcatgaagcgttcgccgttgggcagtttcaggtgtgcgccttcgccacgcagggcttcggtgatcaggaagctcttggcctgtgggtggtacaggcaggtggggtggaactggttgaattccaggttggccacccggcagcccgaacgccaggccatggcgatgccgtcaccgcaggcgccgtcggggttactggtatagaggtagaccttggccgcgccgccagaggcgaggatggtgaagcgtgcgccgtaggtgtcgacttcgccgctgccccggttgagcacgtaggcgccgaggcagcgctcgccgtccaggcccaggcgtttttcggtgatcaggtcgacggcgacgcgttgctccagcaattcgatgttggggcgttggcgggcctggtcgaggagtgtcctgaaaatagccgcgccggtggcatcggcggcatggatgatgcggcggtgactgtggccgccctcgcgggtcaggtggaactcgaaaccaccgtcgtcgctgcctgcgtgttcatcgcgggtaaaggggacgccctggtctatcagccattggatggcctcgcggctgtgctcgacggtgaaacgcaccgcttcttcattgcacaggccgccgccggcgttgagggtgtcttcgacgtgggattgcacggtgtcggtgtcgtccagcaccgcggcgacaccgccctgggcccagaatgtcgagccgttggccaggtcgcctttgctcagtaccgcaatgcgcaggtggctggggagggtcagcgctaggctcaaaccggccgcgccgctgccgatcaccaagacatcgtgttgaaactgttggctcattggaaggattccgcaaaaagcgatccgaagaggtggcgcaaacaggacgcctggatcggcgaatcaaaggggcacacgggctactagtatatagaggggtggagcggcacaatagccgggcattcgtggcaatgtgagattacggtgcacggctcgggtagaatcagctggttattgaagcgggaactttttgcataggccccgactcaatagcaggttgcccgaaagctgggaaaacgttgagtttattggcccgtcgggagcattggacgcgtcagaaaaccgacgacaagattattcgcgcagtcggcgttgcccgtgctgcgtttttcgtgtgtgccaaatcagtgcgtgccggaaacttgcttgaagggggagaacttttgcgaaaagaccgagtctatgtttgcaagcctgatcgtttagttatgcaagcctccttcaagtactacgaggagtgttcatgctaacccaggaagaggatcagcagctggtcgagcgcgtccaacgcggcgacaagcgagcttttgatctgctagtgctgaaataccagcacaaaattctcgggttgatcgtgcggtttgtgcacgacacccatgaagcgcaggacgttgcacaggaagcctttatcaaggcttaccgtgcacttggtaactttcgcggtgatagtgcgttttacacgtggctataccgaatcgccatcaacacggcgaagaactatctggtgtctcgcggacgccgcccgccagatagcgatgtaagttcagaagatgcggaattttacgatggtgatcacggcctcaaggatctcgagtcgccggagcgtgcattgctgcgcgacgagatcgaaggcaccgttcatcgcacaattcagcaactgccagaagatttgcgtacggcgttaactttacgtgaattcgatggtctgagttacgaagacattgcgagcgtcatgcagtgtccggtggggactgtaaggtcacggattttccgggcccgggaagccatcgataaagccttgcaaccgttgttgcaagagaactaaagacagcggcgacagccaagagaggaaccgccatgagtcgtgatgccctgcaggaatcgctgtccgcagtgatggataacgaagcggatgaactggaacttcgtcgagtgctcaacgcatttgatgatgccgaaacccgtgatacctggtctcgttaccaagtcgctcgggcggtgatgcacaaggatcttctaatccctcgtctggatattgctgcggccgtttctgctgcgctggctgatgaagccgttccggcaaaagctgctcgtggtccatggcgtagcctgggtcgcttggcagttgctgcctcggtaactgttgccgtgcttgctggtgttcgcctgtacaaccaggatgaaatcgccggtgccgaactggcccaacagactcagcaaccggtcatggccggtccgcaagtcaaaggcccagcggtattggccggctacaaggaaagctctgacaccaccggcccgatggccaacggtgtactgcaagggcaatccggctggcaagaccagcgtcttccaggctacctgcgccagcacgcacaggaatcggctctgaagggcactgaaagcgctctgccttatgctcgtgcagcaagcctggaaaaccgctaatctgtaaggagctctatgcgagccataccgctccttacgcttttgctcagtggttggtttgcactccccgcccacgccgatgaagcccaagactggctgactcgacttgggcgtgcagagcaacagcaaagctttcaaggtacgttcgtttatgaacgtaacggcagtttttccacccatgacatctggcatcgtgtccaggacggtcaggtccgtgagcggctcttgcagctcgatggttctgcccaggaagtcgtgcggttggatggccggacacagtgcgtcagcggcaccctcgtcgcaggcattggcaattcccgtgatgcaccgtcacgtgcgctcgatccgcaaaaactcaatcaattctacgaactggccgtcattggcaaatcgcgcgtggccggtcgaaatgcggtcatcgtatcgatcacgccgcgtgaccagtaccgttatggttttgaactgcatctggatagggagaccgcgctgccgctcaagtccctgctgctgaatgatcaagggcaattgctggagcgcttccagttcacgcgattgaatacttcggtcgtgcctgatgaccgggatctgcaacccagcagcgactgtacacctatcgccgtcgcaaatagcaaggcgccagaggtgcaatctaccgagacttggcatctggaatggttgccgccgggttttcagctgaccaacaccagtgcccgcaaagacactcagaccaaagcgaccgtcgacagcctgatgtatgaagacgggttggcgcggttctcggtattcctggagccgatcagcgatgcaagcgtcacggagacccgcactcagctgggccctacagtggcggtatcgcgtcggctgaacacggtggacggtgaaatgatggtgacggtggtaggtgaaatacccatcggcaccgcagagcgtatcgcgctatcggtgcgtggtgaaaaaaaaccagccgtccagccgtgagtctttaatcctatgttcatcctgacgtttcactgtacttccatgccaggttggctgccgagagcatgaaatgtctggatcagcattttcacttgcaaaaatccctcatgttttttataggtcagggcttgtcggctctggccttgttttgttcgcggaacaaagatgtcggtcgcggtttccggcgtttcttgaaccctgtcgctcaaccctgctcgtcgtaacgggagctgtatgtcgataccacgtttgaagtcttacctatccataatcgccacggtgttggtgctgggtcaggcgttgcctgcgcaagcagtcgagctgcctgacttcacccaattggtcgagcaagcctcacctgccgtggtgaacatcagtaccacgcaaaaactgccggatcgcaaagtctccaaccagcagatgccggacctggaaggcctgccgccgatgctgcgcgagttctttgagcgtggcatgccgcaacagcgcgcaccccgtggtggtggtggtcagcgcgaggcccagtccctgggctcgggcttcattatttcgccggacggctacatccttaccaacaaccacgtgattgccgacgctgacgagattctcgtgcgcctggctgatcgcagtgagctgaaagccaagctcgtcggtaccgacccacgctccgatgtggccctgctgaagatcgacggcaaggacctgcccgtgctgaaactgggcaaatcccaggacctgaaagccgggcagtgggtagtcgccatcggttcgccgtttggttttgaccataccgttacccaaggcatcgtcagcgccattggccgcagcctgccgaacgaaaactacgtgccgttcatccagactgacgtgccgatcaacccgggtaactccggtggtccgctgttcaacctggcgggcgaagtggtcggcatcaactcgcagatctacacccgctccggtggcttcatgggggtgtcgttcgcgatcccgatcgacgtggccatggacgtctccaaccagctgaaaagcggtggcaaggtcagccgtggttggttgggcgtggtaattcaggaagtgaacaaagacttggctgaatccttcggcctcgacaagccggccggtgcactggttgcgcaaatccaggacgacggcccggctgccaaaggcggcctgcaggttggcgacgtgatcctgagcatgaacggccagccgatcgtcatgtcggccgacctgccgcacctcgtaggtgcgctcaaggcgggtagcaaagccaagctggaagtgatccgcgaaggcaagcgccagactgttgagctgactgtgggtgcaatcccggaagaaggcgcgaccctggacgccctcggtaacaccaagccgggtgccgaacgcagcagcaaccgtctgggcatcgctgtagccgagctgaccgatgagcagaagaagagcttcgaccttaagagcggtgtggtgatcaaggaggtgcaggacggccctgcttccctgatcggcctgcagccgggtgacgtgatcacccacctgaacaaccaggcaatcgatagcaccaagcaattcaccgatatcgccaaggcgttgccgaagaatcgttcagtctcgatgcgcgttctgcgtcaagggcgtgcgagcttcattaccttcaagctggctgaataagtcggtaaaaacaaaaagccccgctttcgtttaacgaaggcggggcttttttgtgcctgacgggtttagctcatcatccctttgaccaggcgttcctgttcgatcaactcacgctggcgtgcatcgatgcgcgacgacagcgggaaattgctgccggcgcgacgcttggcaaaatccaattgctggatagcctgctggaaatcacccaccagcgcaaagtactcggcgcgagcctgatgcagcccgatgatgttgcccgacaagccgcgcgtctcagcgacctggtaccacacgtccgggtcatccgggcgagacttgagcaaaccgtccagcgccttttccgcatcggcggtacggttctgcttgagcagcaggtccacgcgcacctgattcaacggatagttacccggatactgggtgagcatccgatccgtgcgttgctgggcatccggcagtcggttgttgtcgatgtccagctggatctgcgccaggttgtaggtgatgtcgctgggcgctttggccagcagcggtgcaaggttttcccgagcctgcttgaactgggaacctttgatctgggcgatagccaggccgtagcgcgccacatcgttcttcggattttcgtccagttgcgcctggaagcgcttggcggcgaggccaggggtgtcttcgtattgcagttgcacccgtgcacggatgagctgataacgcaggctgtcttccttgccgccaggcttggattgctcggcgcggttacgggtgtcggcgatccgcgattcggtgaccgggtgcgtcaacaggaactccggcggtttggcatcgaagcggtattggcgcatcaggcgttcgaacatggtcggcatggagcgcgggtcataaccggccttttccaggttgaggatgccgatacggtcagcctcttgttcgttctggcgagagaatcgacgttgttcttggatcgccgcggcctgggtgccggcaatcgcggcaatacctgcatcgcctgcacccgccgccgcagcaatgatgccgccgagcagggcggccatcatcggaatctgcatgcgctgttgcgcttcaacgccacgggcgaagtggcgttgggacaaatgcgccagttcgtgagccagtaccgaggcatattccccttcggtctgggcgttgaggaacaggccgccgttgaccccgacgatgccacccggtgcggcaaaggcgttcagttgcgggctgttgatcaggatgaattccagccgccggtcattgacctggctggtctccaccagcttgtacacgctggtttcgacgtagtccttgagctgcgggtcgttgagttgcgagacctggccccgtaggtaggccagccaggcgcggcccaactggtattcctgttgcggcgagacaatggcagaactggcgtcgccaagtgacggcaggtcgtcagcgaagcctggggaggccagcaggcaagccagcgtcagcagggtggggcgcaaaaaagtcatgcacagagcctttcgacaaagagcttactgtagccggacactgagcttcggaccagatattctaagcactcccgacgcttgcccggagtaaaccatgaccaacgctgtagcctttgatgccgaactcgatgccagcggcctcaattgcccgctgcctttgctcaaggccaagctggaactcaaccgtctggccagtggcgcagtgctcaaggtgatcgccacggacgctggctcccagcgtgatttccgtacgtttgccaagttggccggccacacgctgttgcacgaagaagacgccgccggtgtttaccgttactggttgcgcaaggcctgaaccgtttgccccatcacccgaggttgattgatgttcaaagtgttacgagactggatccagcgctacttctccgatgaagaagccgtggtgctggcggtcctgctgtttctggcctttacggccgtactcaccttgggcggcatgctggcgccggtattggcggggatggtgctggcttacctgatgcagggcctggtcactacgctggagcgcctgcgcctgccgggtggtgcggcagtagggctggtgttcgccttgttcatgagcttgttggtgctgtttatcgtggtggtattgccgctgttatggcatcagttgatcaccctgttcaatgaactgcctggcatgctcgccaagtggcagtcgctgttgctgttgttgccggagcgctacccgcatttggtgtcggacgaacaggtgctgcaagccatcgaagtggcgcgcggagagatcggaaaattcgggcaatgggcgctgaccttttccctgtccagcctgccgctgctggtcaacatcatgatctacctggtgctggtgccgatcctggtgttcttcttcctcaaggaccgcgccatgatcggtcgctgggtgcgaggctacctccctcgtgagcgcgcgttgattacccgggtggcggaggaaatgaaccggcagatcgccaactacattcgcggcaaggtcatcgagatcattatctgcggtggcgtgacctacatcgccttcatcgccctggacttgaactacgcggccttgttggccttgctggtggggatttcggtggtggtgccctacgtcggcgccgtggtggtgaccgtacctgtgaccttgatcgccttgttccagtggggctggagcgaccagttcatctacctgatggcggtttacgggatcatccagaccctggatggcaacgtgctggtgccgctgttgttctcggaggccgtcaacctgcacccggtcgcgatcatctgcgctgtgctgttgttcggtgggttatggggattctggggcgtgttctttgcgatcccactggcgacgttgttcaaggcggtgctggatgcgtggccgcgccaggagccggtggttgcgccgatgttgtaacaaatggggcgaacaggggtgttcgccccaaggcttcaagccttgtttaaagcctgcgccgccgccagcacggcatccacatgccctggcactttcacgccacgccattcctggcgcagcacaccatccttgtcgatcaggaaggtgctgcgatccacacccaggtattccttgccgtacagcttcttcaacttgatcacatcaaacagctggcaaaccgcttcatccttgtcactgatcagctcgaaggggaacgcctgcttgcccttgaagttctcgtgggatttcacgctgtcacgcgatacgccaaacacctcggtgttggccgccttgaacgctgcgtactggtcacgaaagccctggccttcagtggtgcagcccggcgtgctgtccttcgggtagaagtagatcaccacttgcctgccctttagggcggcgaggctgaaggtctggccgctggtggcctgggcttcgaaatcggctacgggtttgtcgatgactaccgccatgaaaacttccttacattgggttctgtgggcgccatggctcgatcaaggcgtcgaggttcagggcatcggcgaaatccaggaactggtcgcgcaaccagctgatctgcacgccagccggcaacgttacggtaaacgtagcgttaagcatggtgccgccggtttgcggggcctggtaggtgtcgcaggtcaggttttccagctcgacgttgtggtcgatgaagaactggcacagctcgttgacgatgtccgagcgataggcggagctgacgtaagccacatacggcagggcctgggggcgattctccagggcagcgctgcgcaccacgttgacggtgaagtcatgcttcttggccaggcccggcaggccggtttccaggcgcgccagggcatcccaggtgccggagatctgcaggaccagcgcgctgcactcgccgtggcgggtcaggcgggaggtcacgacggcgcagcggttttcatggctggcgcggcacaggacgttggtcagctccatggggttggcgccgagggcactgataacaaggaattgttcgcgaactgtgggggtggacatgcagccttcctaaaacgatgagcggtcgataccgtgtgggctgtatcgatcaaaggatgaagggtagcgaaaaccgtcgccaagggataggagggggcgttttcattgcgtgaccggtctgatttcatcgtgcttcagggcgtgcttctgcccaatgatggcattgcctgtcgtttagttgcgccagaacgcatcctcaggcggtacttcgcttgtgcaagcatcttggcgccagtaccattacggctctctttttccggcaggagcggttgcatgattgcgggcagtatggtggcactggtcacacccatggatgcacaaggtcatctcgactgggacagcctgggcaaactggtggacttccacctgcaagaaggcaccaacgccatcgtggcggtcggcaccaccggtgaatcggccaccctcgatgtggaagaacacatccaggtcatcgagttcgtggtcaagcgtgttgcgggccgtattgccgtgatcgccggtacgggcgccaactcgacgcgtgaagccatcgagttgaccaaaaacgccaagaaggccggcgccgacgcctgcctgctggttaccccgtactacaacaagccgacccaggaaggcctgtaccagcatttccgcgccattgccgaagcggtcgacatcccgcagatcctctataacgtaccgggtcgcaccgcgtgcgacatgaaggccgagaccgtgatccgcctgtccaccgtatcgaacatcatcggtatcaaggaagccaccggcgacctgcagcgcgccaaggacatcctggccggcgtgagcagcgatttcctggtgtattccggtgacgacgccaccgctgtcgagctgatcctgctgggcggcaagggcaacatctccgtgaccgccaacgtggccccgcgtgccatgagcgaaatgtgcgccgccgccatcgccggcgacgccgtgaccgcccgcgcgatccacgagaagctgatgccgctcaacaagacgctgtttatcgaatccaaccctattcccgtgaagtgggcgctgactgaaatgggcatgatgccggacggtatccgtctgccgctcacccgtctcagcgaagcctgtcacgaaccgctgcgacaggccttgcgccagtccggcgtcctggtttaattgaggaagcactacgcatgaagcgattggccggactttccgcacttgccttgattatctccagcaccagtggctgcggttggatctggggcccggaaggctacttccgtgaccgcggcagcgattacctggaagcacaacctaccaaaccgatggaattgccgccgggcgtcaacgtcgccaagcgccttgacccattgttgccgatcccacgcaacgtcgccgacgacaccaccaaaggtgagtacgtggtgccgcgtccacagccgatctcggccgtggcggatgccagcgactacagcctgcagaagagcggcgactcccgctggatcgtggctcagcgcccacctgccgaagtctggccagtggccgtgcagttcttccaggacaacggtttccgtatcgacgagcagcgtccgcagaccggtgaattcaccacggcatggcagcagggcagcgaactgtccgccaccatggccaagcgcctgcaggccggtggtgtagccgccgacagcgaagcccgtgtgcgtgtgcgcatcgagccaggcgtgcagcgtaataccagtgaagtctacgtggtcagcgccgagcgcccggccggcagcaccgccaacgttgacttcactaaccgctcggtcaacaccggtgtcgactcggcgctggtcgacgagatgctggccagcatgagccgtatctccgagaagggtggctcggtttccctgctcgccgcccgtgattacgacaccccgagccgcgtcagcctcactgaggacggcagcggcaacgtggtgctgaacctgggtgaggaccttgatcgtgcctgggccagtgttggccgcgcgttggagcagggcccttggcgcgttgaagacatcaaccgcagcctgggcctgtactacatcaacgtggcggaaaaggccgagcgtaaagacgacgagcctggtttcttcggcaaactgttcggcagcaagccgaccaaggaagagatcgagacccgcgccgagcgttaccaggttcgtttgagcaaggtgggcgacagcgtgcaggtcaccgtcgagaagaacatcaataccgttgcgccagctgaaacagcacgcaaagtgttgggcgtgattcaggacaacctgggctgatccgatgcgttttgccgttctcggcagcggtagccaagggaacggcacgctggtcgcacatgacgacacgtatgtgctggtggattgtggtttctcgttaaaagaaaccgagcggcgcctgctgcgcctgggggttcaccccgcgcagctgagcgcgattctggtgacccacgaacatgccgaccacgtgcatggcgtgggtttgctgtctcggcgctacaatctcccggtgtacctcagtcgcggcaccttgcgcgggatgcgcaaacctattgaacccgcaggtttcctggccggtggcgagcagttgcaaatcggcgccttgagcatcgatgtgattgccgtggcgcatgacgcccaggagccgacgcagtatgtcttcagtgacggtgagcggcgctttggcgtgctgaccgacctgggctcctactgcaccaaggtgctggacggttaccggaacctcgatgccttgatgatcgagtccaaccactgccgagacctgctggctcgtggtcattacccctacttcctcaagcagcgggtgggcggcgaactgggacatttgaacaaccaccaggcggcgtacctggtgtatgagttgggctggcaagacttgcaacacctggtcctggcccacctgagcagcaagaacaacctgccgcagctggcccggcaatgttttgtcgacaccctcgggtgcgacccggactggctgcaactggccgatcaagattcagggctcgactggcgacacatcgcctagcccaccatttagcaagcggagcccatcatggaaaaacgtgaagaactctaccgcggcaaagccaagtcggtgtacaagaccgacgacgccaaccgcctgatcctgctgtttcgcaacgacacctcggcgttcgacggcaagcgcatcgaacaacttgatcgcaagggcatggtgaacaacaagttcaacgccttcatcatgcagaagctcgaagcggccggcatcccgacccaattcgacaaactgctcggcgacaacgagtgcctggtcaagaagctcgacatgatcccggttgaatgcgtcgtgcgtaactacgccgccggcagcctggtcaagcgcctgggcgtggaagagggcctcaagctcaacccgtacaccttcgagctgttcctgaaggacgacgccaagggcgacccgttcatcaacgaatcccacgtcgtggcattcggctggggcaccgctgagcaactggcacgcatgaaggagttgtccctcaaggtcaacgacgtgctgagcaagctgttcgacgacgcaggcctgctgctggtggacttcaagctggaattcggcgtgttccacgacggctccatcgtcctgggcgacgaattcagcccggacggctgccgcctgtgggacaaggacaccaagaagaagatggacaaagaccgcttccgccagggcctcggtgacgtcatcgaagcctacgaagaagtcgccaatcgtctcggcgtaccgctttaatcgacgcaagcatctgatagcacggaaaaaaatcgcttcggcgctttgcatccacgaatcatgctgttatgatgcgcgccgttggagagatgccagagtggccgaatgggacggattcgaaatccgttgtaccttcaccggtacctagggttcgaatccctatctctccgccattacatagaaaaagccccatagctgaataagctacggggctttttcgttttggaatgtaatcgttccttcgctgtggccagcaagccttcaagcgtgatcctacttcttgcccttcggctttgacggcggctttttatccgtctccttcaccgtctccctaggcctcttctttgcctcagcctctgtcacgtactcccctgtgaccgcatcacgatatctagctggcatataacctccttggcagtatgtcgccacggcggcgactttttcaggctagtccagaggcctgggcgcacaagattcattgtgcgaattctcattaccaggcttttccatcgccgttgcggggttgtgacacccaacacctgaaaatgaaaaaagcctgctgaactcaaggctcagcaggctttttggtggtcgctgtttgcttatgcgggttgggccgccaagctgttacttacattacgccccagcaccagcaccgtcacaaagcctacgcccaccagcgccgtagccaggctcaacaacaccgagctgcccatctggtcgacgattcgcccgccgaagaatgaacccaaggcaataatcacctggaacagggcgacaaacagcggcatgccgcgttcgacatccttgggcgcgaccacgaacatccagatactggcgcaggccgggaaggcgccgaaggcaaagccccacaggccgatcagcatcgctgcgccggtcatgccggtggcgaagtaggggaaaagcgcggtgctggtgccgatcatcagtgcaaccagcatcaaggtgtggcgtacgctgcggttggcggcaaaaccggcaaaaatattaccgaagaccccggccacgccaaagagcagcaacagcgaaccaatcgttgggccgtcgaaaccggagctgtatttaaagaatggcgcgacataggtgtacgcagcaaagtgcgccaggccgatcagcaataccgcgatcaacccgacccgagcccgtgggttgatgaacaaggcgggcaggtcgcgcaccagaatggctttctccggatccagccgaggcaacaggaggacctgggccatcagcaccggtatacccaccagcgcggtgaccaggaacgtcatgcgccagcccatcaggccactgagccaagtgccgaccggcacgcccagaacggtggccagggtcacgcccatcatgatgatcgaggtcgccttggcgacgtccacacccttgggcgccaggcggccgctgagggcgatggccgtcgcccagaaaccgccgatgctgatgcccagcaagacgcggccgaatagcagcaggctgaagtcactggcgaacgccacgaccatgttggcgatgatcatgatcagcgtcagaccaatcagcaggtagcggcggtccatggcgccaatgatcaccgacagcaacggggcggcgagggcggccatgatgccgggcagggtcaccatcaggccggcgtggccggcactgatgccgaggtcggcggcgacgtcgttgagcacgcccactgggagaaattcactggtcaccagggcgaaggcaccgacggcgaccgagagaatcgccagccactgctgtttgacgctctgttgattatgttcgggaaggccgctgggggcctggctggcacttggcatggtgttgggttccagggtgaatgtcgcctgaggccaggcgagggggagggaaattggaggcgattataggaaccggtactgaaaatcgggcaggcgctcgtttcgatagtaatcatcagtgctatcgatgcgacgctctagcccgcacgacatggccagtacacctctcgcacatacgtccaaggtaatgcctaccggcagcgcgttgcgataccccgggcaatccttttggtcgctttattttccccgtctttctcagcagcagaaatattaagtagcacttccatcgacatcgctaaagtcctgccccggcgggccgaaacgctctcatacgacgtcgtatccctgataagagagtcccctgaaaatgtcccttcgcagcctgtccatcgcccgccgtgcgggtctgggtttcgccttgattgctttgctggtggccctactgggtttttttgcgctatcgaacatggcaagtatccgcgccaacgcggtgcaggttgaaagtgggctggtgcccaagatgcggctggtggcggatattcgcgaaatcatgttgcgcattcgtacgatctctttgcgcatggcgttggacccgaaccccgccagccttgcgcagtaccgcagccagatggacacccgtagccaggacctgacgaaaaggttggccgagcttgatgcggtcatcgacacccctgaagtgcgctcgctctatgaccagtttcaggtgtcgctgcgcctgtaccagcaaggtctggcacagtccttcatccttgccgataagcagcagggcgccgagcttaacaagctgctgctggtggacatgaaaaccgtggttgatggttccggtgcgcaactcaatgccctggctgactactacaacgcacagatcaatcagcagggtcaggaggcggaatcgcaatacagccgttcgcgcaccatggtggtcggcttcgtgctgctggccgccttgagtacggtggcgctggcgtggttattgactcgcagcattgtcggtccgttgggccatgcggtgcgggccgccgaaaacgttgcccacggtgatctgactcaaacggtagacgtgaccggcgatgacgaagtaacccgcttgctcgtggcgctcaagaccatgcagtccaatctgcgtgggaccctgcaactgatccgccagtctgcagggcagatggcgtcatccgccaccgacctgaatggcatcaccgatcaaagcagccgcagcctgcaaaagcagaccgctgaaattgaacaggccgccaccgctgtgaacgagatgacctcggcggcggatgaggtggcgcgcaatgccgtttccacctccgagtccactcgcctctctaatgaaacggcgcgcgaaggccagcatcgtgtcggcgaaaccgtcagcgccatccaggccctgagttctaacattggtgaaacgtcgacgctggtgcagaatctcgccgagcaatcgcgcgatatcggcaaggtactcgacgtgattcgctccattgccgaacagaccaacctgctggctctcaatgcggctattgaggctgcgcgggccggcgagtccgggcgtggctttgcggtcgtggctgatgaagtgcgcgcattggcgcaccgtacccagcaatcaaccctggaaatcgatcaaatggtgaccgcgatgcgctcggggtctgaccatgcactcacatcaatgcaatcgagtacccagcgtgccaccgataccttggccttggctgagggcgcgggtggtgcattgagccagatcaccgactctatcgaccagattcaccagcgcaaccttgtcattgccagtgccgcagaggagcaggcgcaggtggccaaggaagttgatcgcaacatcgtcaacatccgcgacttgtccgctcagtccgcttccggcgccgggcagattaatggatcgagccgagagctggcgcagttggccgtcgcgctgaacgaggcggtggcacgttttcagctgtagtgggactagggttaaggcgtgagtgaatcggactgcagttccaacacccgatctcttccgccttcggccactaaataggcacccggaccggtccgcacaatcgattgcggcgccttcaggaacgacaaaattgtctgctggtgcccttgcttatcgatcagtaacaggcgcgcccgatgagtcgagtcttcattgatccacagcccacgctcatcgcacatcaaaaacgtcggcttgttcaggttgctcaataccaccggatcgctgccgtcctgagtgagttcgtgcaccacgccttttttcttctcggtgtagagcatccgcccgtcagtacaacgcacgatggactcgccttcctgcaattggtcgcgaaccacggtgagggtctggtcgctccagcgataacgcagcaatcgcccgacgggtttgcggtcttcgatggcatagagatcgtcgccgtcatcccacaggccttgcacgttctcgcctttgaacagttcggtgacgacgccgtccttgaagaaactcacgggcaggtcggccgattcctggctgaacacccagccgccgcgggtggcgaacaggccgtcgggtttggacaggctggccaccaccacgtcgcggctgccgtcggggtggatgcgtacaatgctgcctttggccttgtcgagttcctggctgaccatcagcgagccgtccgccaggggcatcagtgaggcggccttggggacgtcgcggtgcaccacttggacactccaccccttggcggcactgacggggtagtaactctgccaggcaaaaaagcccagggttgccacgcacagcaggcctgctgcgcgcatgccaaatcggagcgccgggtatttttttggagcgttggtcatcgagagttgccagccgtcggggggaaagatcgtcgaccaccctaccaagcttgtcgctgaacttcacgcgtgggaaacccgttgccccgtttactggtgcctagtcctgctcccccacgccctgtctgattttttccagcaactcatcgatatgaaagggcttggtgagcaggtccatgcgttcgcccaggaagttctggcggttggccgcattctcggcgtagccggtcatgaacagaatcggcaggttgggatgcagggcgcgcgcgtggtcggccaactcccgaccggtcatgtagggcaggccgacatccgtcagcagcagatggatgctcgggtcggcctgcagaatggcgattgcttcgtcaccgtcagcggccaggctgcagcggtagccggcgtccatcaggacctcggcgacaaaactgcggaccgagggcatgtcttcgacgatcagtatatgttcacccttgctgttacctggcactgccacggtcttggtggcaagggtggcagggccgtcggcagcggggagcatgagggtcacctcggtgccctggcgggtgacgctgcggatctgcgcatcaccgccggactggcgggcaaagccatagatggtcgacagacccaggccggtgccctggcccacgggcttggtggtgaagaatgggtcgaacaccttatcgatcacgctgtgctcgatgcccacaccgttgtcccgtaccgacagtgcaacgtacgggccgtcttccagcttgaggtggccgttggagtacgatgggtaagtcgtcacccagataatcccgccctggggcagtgcatcccgcgcgttgatcaccaggttcagtaccgcactttccagttggatcgggtccaccagcgccacggcggggttgctggtcaactccagcttcagggcaatgtgttcgccgatggtgcgcaccagcagttcttccagggagcggatgtgtgcgttgatatcggtcggccgggtgtccagtggctgctggcgggcgaaggcgagcaggcggttggtcaggccggcggcgctaagggctgaactgagcgccgcgtcggcataacccaggaccttgtcggtgcgctggctttcgatgcgcttcttgatcagttccaggctggtgatgatgcccgtcagcaggttgttgaagtcgtgggcgataccgccggtgagcttgcccagggcatccattttctgggcctggagcagttgcgcctccgtacgtgcaagctgggtggcggcgttggccagttcggcctgctggtgacgttcacgatggcggtgttcggtcacgtcctcgacaaacaccaggctcagctcggcgcggtcatagggcgaaatctgccattcggtttcgcgcagttggccatcgaccttcatctgcagcgtgcccttccagcgctcgcctgccgcgaggcgcaagcacagctcctggataacgctatattgatcgctggcgaagcattcgagcagggcgtgcgggttgaggttgtcgtggatcagttgggcgaaggcgtggttgcactcgtgaaccttcaactgcgcgtccatcaccgcaatcggtgcgctgatattgaagaagatttcccgaaagcgcgcctcgctttcgcgcagggcgtattcggtgtcgcgtacccgcagcaaggtgcgcaaggtcgccagcaggacctcggggtctaccgggtggatcaggtaggcatcggcacctgcgtccaggccggtgatgatgtcgccggtctcgatggacgccgccgaaacgtgcaccaccggcagcaacgccgtggccgggttggcgcgcaaaccgcgcacgatatcgaagccgctcatgtcgggcaggttgacgtccaggatcagtgcgtcgatcttgccccttgcgatcaggtcgagtccttcctggcccgtgccggcttccagtacccggtagtgatgacgctcaagacgtcggcgcagggcgtagcgcgtggcggcgttgtcgtcgacgatcagcagctggatgtcacgtttcatcgacggtctcgctggcgatggaaaagggaatgatcacaaaaaacagcgagcccaccccaggtgtgctttccacgcccacccggccaccgagcagttcggcgaaacgcttgcacaaggacagccccaggccggtgccgcgcagacgtttttgcaagggcgaatcgatctgggaaaagtcttcgaacaggttgctgtgcaattcggctggtatacccaggccggtgtcctgcaccgcaaagcgtatctcgtgttcattctccatgcgcgccgacacccgcacttcgccctgcgtggtgaacttcagcgcgttggagataaagttgcgcaggatctgcgccagtttcttgtcatcggtgtagagcttgggcaagccggacggctcttcgaagatcaggtccaccgaggacgcatcgacaatcggccggaacatgccgcgcaatgccgagaacaggtcgaacatgtcgaaccaggccggggaaatgctgatacgcccggcctcgatcttggccaggtccaacaggtcatcgaccatctcgcgcagttcgcgggccgagttgcgaatgaagccgacctgggtgtgctgttcctcgctcaacgggccatccagctcatcggccagcaggctggtgatgctcaggatcgagcccagcggtgtgcggaactcatggctcatgtaggacaggaagcggcttttgaggtccgatgcctggcgcagttgatctgcctgggtgtccagttcggcatacagcgcgagcacgccttggttggtttcgtccaactcggcacgcaaggcgtccgcctccaggcgaaggcgttcgatttcagcggcgagcgcggcaggggtgtcagccatcaatggcctccagggcaatcacgaagaccgtgacgtcatcccggccgcgacagaagtcacggtgcaggacggcggcgatcagggcagggtggcggtggacgagcccggggtagtccgaaaggttccagcgtgattgcaggccgtcgctgtagaggatcagcaactggccgccgacttgagcgtagtcgaaggcatgcgccttgcgaaactgcacgccgacgatcccagggtgcgaagccagtccccgggacttgccaggcccgatcaggctggcgccaatattgcccacgccggtaaacctcaggtgatcggcctcggcatcgtactgcgccacggcaagggcgccgccgcgagtgccgttcatggcaatgtgcagatcgttcatcagcaccgtcgaatccaggaaggcatcctgggcaaataccacttctcctgcccgcgcggcgtgctcggcatattctccatggccgagtccatcggccaccatcacactgaaacgaccgggttcgattgccaggtgccaggcatccccgcagtgcgggtcgtcatgcagtgagtgctggctgaccccgtagcgaatgtcttttgcaaccgaaccgcgcggatacagcctggccaggatcgccgtgccgcgttgatcggcgtaggcatcgaatacctgggccaggcgcgaaattgcgcccaggccaatgccttgggtacctccggtggagtagccgtccaccaggcagctgttcaggtcgaagccgtggccacggtcgatggcgaccagttcgaggccaccattgccggtggtgcgcaggtgtagttggccgtgctcggcatgcttgaggatattgctggccagttcagtggccaccagggccacgcgcccggcatcggtgtcgtcgaagcccaactgctcggcgagctgctgcgccgtgcgacgggcatgaccgatctggctggtgtcctcaatcagcagtacatgcgtcagggcgctggggatgttcaggcccatcgggtgatcgtcacgcgggtgccctggcctggcgcggtctccagttcaaattcatccaccaggcgcttggctccggtaagccccaggcccaggccgctgccggaggtccagccgtcggtcattgccagcttgagatcgggaatgcccggcccttcatcacgaaaggtcaggcgcacgccgggtcgatggtctttttccaccaccgcccaatccatgtagccgcccttgccatagaccaccgtgttgcgcgccagctcgctgaccgccgtgaccagcttggtcaggtcgatcaggcgcatgccgcagtcctgggccagtttgcgtacgagttgtcgagccagcacgacgtcctgttcgatcagcaccgggtgggtgccattgctggcttgggtcatgagtgttctacccggtcacgcagcagtttcatgccgcgctcgacattcaacgccgtcgccacgccaggcagggtcatgcccagttccaccagcgtaatggccacggccggttgcatgcccaccaatacggtctgggcatccatgatgcgtgacaggccggaaatggtaccgatcatgcgtccgatgaacgagtcgaccatgtccagcgccgagatatcgatcagaacgccgcgggcggaagtgcggttgatgcgttcggacaagtcgtcctgcaaggtcagcgcgagttggtcgtgcatgtccacctggatggtcacgagcaagaactcgcccatctgcaaaatagggatgcgttccatgcttaaacggccttggtgacggtgacgcctaggcgtttgagggagagtgccagcgcgtcggccaggttggccttggtcaccacgccttgcaggtcaaggcccaggtgcacgatggtctgcgcgatttgcgggcgtacgccgctgatgatgcaatcggcgcccatgaggcggatggccgtgacagttttcagcaggtgctgggccaccagggtgtcgacggttggcacgccggtaatgtcgatgatcgcgatttccgcgccggtatcgacgatgcgttgcagcagcgactccatcaccacctgtgtgcgttgcgaatccagggtgccgatcatcggcagggccaggacgccgtcccacagcttgaccaccggggtggacagctccagcaactcttcctgctggcgcttgatcaccgactcccgggatttctggaaggtgcggatggtgtgcatgcccagggcatcgagcagttcggagatcttcagcagttgttcggccagttgtgccggttggtcggcatattctcgctgcagcaggatgaacagcggacccttgagggcgaagataaagctggcggtctgttgcgagtcctggccggcgagggcgcggctgtgggacaacttttccaggaatacgcgggtttctgcccagttgtcatggtcggtgttctgcgagctgccttgttgcagggctgtcgtcagcaggttcaggaactcctgggtttgctgtttgacgtcatcgcctttgatgttgcgcgtcgcccctgaggtatcgaggctggcattccattcagcaaggagggcgctgcgattgtcctgcagggcctggattgtgttcgtttgcagagttgccacggggaacctccttgaatgccatcgatgggaatcgcgcaatttatactaaaacgaactgtttagaattgtttccggtggaatcgttcattagtggcactgcgacattaatcggcggtggacccctcttgctgtgacagcacggcgtaatcctggccgccgtagaaaattcccagaatcgacaccctccgcgcacgtgcatccaccctgaatgcgatgacggaggaatgccgataatgcgtaatgcgtaggccaggcagcacgtcgtcccggcgggtgccatgtaaaggaaacatggtcaggttttcgcagcaggtcacgaggttgtcgacgaagcgtgcggcgaccagcggcgagccggtatcgctgatgtagtcttcaagggcgtcaagttgggtcagtgcctcgggcgaaaaggtcactgaatacttcacgttctatcgtggcctttgcgctggcgtttggtggccagatgctcacgaacctgctcggccgataacgcccggccggggttggcatcgagcgccacggcggcggggataacctggtcgcgcagccagtcatccatggcgccatcccgtgccagcaaggcccgcaggccgtcgcggatcacttcgctttcggtggcgtattcaccggcagcgaccttggccttgaccaaggcagccatttcgatgggcaaggtaatgctcatttgctgggttgagcgcatttggacgtccgccaggggtgagtaggattcaatcctacttgaccattggcgtgatgcaaggagcatctggtcaaagccgatatccggcgtctcgtcgtccatccagaagtgataggtttccatgagtgagtccatctcccgttgtgtaggtcaggccgcaagtattgacccatttcaacgattgcgtggtcgcgggcagccaataacccgctgatatgtatgacttcatatttgtagcagggttattacggcaaaccggtcctggcacacatggcgccccacccgctcccatacgataatgcccaccccctcgaccactctggcctcactcccgtgatcatcaacttcgacctcaacgacctccaggccttccgcgctgtggtagacaagggcagtttccgtggcgccgccgaggccatccgcatctcgcaaccggccctcagccgacgcatcgaaaagctcgaaaccgccctggatgtaaaactgttcgaacgcaccacccggcgcgtcagcctgaccatggtcggccgcgccttcctgccgcaggtggagcgcatgctcgatgacctcgacgtggcgctgatgggcatcagcaacgtcgcgtccacgcgcatgggcaatgtcaccatcgcctgtgtgccgtccaccgcctactacttcatgccccacgtgatctccgagttccacaagctgtacccgaagattcgcctgcgcgtactggatgccagtgccggcgaagtgtgcaatgcggtggagagtggcgaggcggatttcggcgtgagtttcagcggcagcctggccgatgaggtggagttcgagctgttgctgcaggagcgctacgtgctggcctgtcgtcgtgaccacccgctggcccagcgcgacagcgtggcctgggccgaagcctttgagcatgattacatcacgctcgacaaaacctccggcaaccgctccctgcttgaccaggccttgcgcggcgtgcgggtgaaaaagccgagtatctgcgaaacgcatcacgtgaccaccatgatcgggctggtggaggcggggctgggggtggcgatggtgccgtcgattgcgatgccggcggtcgagcatccgattctggtgagcgtgccgctggtggagccgcaggtgatgcgcaacgtgggcttgataaaacgccgcgggcggactttgccgccagcggcgctggagttggagcggttggtgcgggagatgccgttccggtcagcgtgacaccgaatccagcccggtggattgcaccaccggttgcacctcgggcgaggccagaaattgcaacaacgccttggcctgctccggatgttcggcgttgaccggtatgcccgccgcaaagcgtgtcaccgattgcacgtcttccgggatcttgccgacgtaggtcacaccgggcaccggcaacaattccgcgacctgctgcaagcccacttcgtagtcacccttggccacctgctcggccaccggcaggcgttcgatcatggtgcctttggcgggcatgccgagcttcttgaacagctctttctcgacatacacaccgctggcgctgtccgaataggccaccgatttggccttgctcagggcggctttcaattcggcatcggtgccgatggccggtttgacggcgccggccttcaccaccaggccgatgcgcgagtctgccagctccacgcgggaggccgggtcgaccttgccctgcttgatcaagtcgtccagagcgtagccgaccatgatcaccacgtcggcgtgttcgcctcgggccaggcggttgggaatcgcttccggcgccttgcccatcgacgggccaaggatagtgtccagggtatcgccgctgtgcttggcgtattgcgggccgagcaacttataagcggcagtgaagccacccgacgtcatcaccttgagctgttcggcctgggccgacagcgccagggcgccgagggccagtgctgtcagggtcttgaacagaagcttcatcacgcggccccctgcatcacttggccacgggcattggcgcgacggtacagcgccagggtagagcacaacgcgcacagggcggcgaacatcatccagtaggccggcgaggccttgtcttcggtgatgtgaatgaaccaggtggagatcgccggggtgaaaccgccgaagatcgcggtcgccaggctataggccagggagaagcccgccacacgcacttccaccggcatgatttcggtgagggccgggatcatggcgccgttgtacataccgtagaggaacgagaaccacagcagggtttccagcatgtgggcgaagctcggtgcgttcaccacgtaggacagtgctgggtaggccgtgagaacggtcatcgcggtcatggcgatcagcactggcttgcggccgaaacgatcgctcaacgtaccgccgatcggcagccagacaaagttcgacaccgccaccagcagggtcaccagcagcgcatcggacgtgctcagttgcagcacggtcttgccgaaagtcggcgcgtacacggtgatcaggtagaacgcggtagtggtcatggccaccatcagcatgccgccgatgaccacggtccagtttttcaccagggtcgccatcacttcacgcatggtcgggcgatgtttgcggttggcgaattcttcggtttcctgcaggttgcggcgcagcacgaagatgaacgggatgatcacgcagccgatggcgaacggaatgcgccagccccagtcggcaaccaccgagggttccatccacacattcaggccataacccagcgcagcggcgaccacgatggagatctgttggctacccgattgccagctggtgtagaagcctttgcggcctggggtggccatttcagacaggtacaccgatacgccgcccagttccgcaccggccgagaagccttgcagtaaacgaccgagcagcaccagcagcggtgcccacaggccgatggtgtgatagccgggcaccagcacgatcagcagcgtgccgctggccatgatcgacaaggtcacgatcagccctttgcggcgcccgacgtcatcgatataggcacccagaatgatcgcgcccaacggacgcatcaggaagcctgcgccgaacacggcgaaggtcatcattaatgacgcaaattcattagcggcagggaagaacgcggcagcgatgtaggtggcatagaaaccgaacaggaagaagtcgaactgttcgaggaagttgcccgaagtaacgcggaataccgcacccactttcgagggggcagaatcgggacgggtagagctagtcatggttttatgtctccagcgttcttttaaagtgcttgtttcgcttaagacctagcatagtggctgacacatttagaaatgaaaagtgacaaatttggatagattgatgtgttttggctatcaattggtaatgcggtcggaaatacattcgctgtctatgctgaagatgtgaccaattcttacggatgggaggtggcaatgactgatcaacagaaacggcgggacgagtcggaacgtgagcagccccggcggcatgaggaagaaaaaccgcagacctggaaacatcccgatgatggcaccgagctttcagagcgcgaccaggagcgtccgctgaaaccctgatatcagggtttcagcggtccaaatgtgggagtgggcaagcccactcccacatttgtatgtgcaactcccaaaatcaggaaactatttgacatatttgatttgtgatcacatattgaggccataagaaccacaacacaggttttgcctcatgacagatggtccgctcctcctgcccaccctgcgccaggtgtcccgcgataccttgcaagaccaggtctaccgccagatccgcgaagcgttgatgagtggccgtttccagcctggccagaaactcaccatccgcggccttgccgaagcccttggttccagcccgatgccggtgcgcgaagccctgcaacgcctcagcgccgaaaacgcctttgaagtcaccgagacctcccgtctgcgtgtacgcctgatgacggtcgaacgcctgcgtgaaattcgtgatgcacgggtcgccctcgaagggctgctggcggaaaaagccgtgctgcgcctgcaaaaggctgacctcgacgaaatcaccgacctgtgccagcaaatgcaacacgccgccgacgaagtcgacgtgtcgcgctacctgtggaccaactttgcattccaccggcgcatctacgccgtggcccaggccgagctgaccatggccgccgtggaaaacttctggctgcacatgggcccgtgctttgcgctggtcgccccggataaagctcacctgcaacgctcgatggaggcgcacacgcgcattgtcgaggcgctggctgcccgcgatggcgccggcgcccgtgcagcggtgaccgatgacatcatgcaggccgccgactccctggcgcgcctgctcgtcaagaacgaccgttcgcggtcgtctgcttcaggaggtaaacgtgcatgagtgtcctacagcggctgcagccctatcctgggttacgtgtgttgatttccggcggggctgccggcattggtgaagtgctggcggcggcgtacctggaagccggtgcccaggtgcatgtgtgtgacgtgagcgagccagccctggccgcgtttcgcgacaagtaccccggcaccgtcgccacccgcgccgacgtcagcgatgccgcgcagatcgaagcggtgttcacggtgcagcgcgagcatttcggcggcctcgatgtgctggtcaacaacgccggaatcgccgggcctaccggcggtatcgatgcgatcagcgacgccgagtggcaagccactatcaacatcaatctcaccgcgcaataccgctttgcccaccacgcggtgccgatgctcaagcaatcgtcccacggccacctgctgcatatcgcctcggtagcggggcgcttgggctacgcgtggcgcacgccgtatgcggcgaccaaatgggcgattgtcggcctgatgaaatccctggcctcggagctgggcgagagtgatatccgcgtcaacgccttgctgcccggcatcgtcgaaggcccgcgcatggacggcgtgatccgcgcccgtgccgaacaggtcggcgtgccggaagccgagatgcgccaggaatacctcaacaaaatttccctcaaacgcatggtcaccgccgaagacgtggccgccatggcgttgtttctctgttcgcccgccgcacgcaacgtgaccggccaggcgatcagcgtcgacggtaacgtcgagtacctgtaagccacggaagaacacatcgcgcagcacccaggatttttttcataagaataaaagtcggagattcgtcatgtccaaaaatcgtcctgtcatcatcacctgcgccgtcaccggtgcgattcatacaccgtcgatgtcgccgcatctaccgatcaccgcgcaggaaattgccgacgccgccatcggtgccgccgcagccggcgccgcgattgttcatctgcatgcccgcgatcccaacgacggccgcccaagccaggacccggcgctgttcgccgaattcctgccgcagatcaaggccgccagcgacgtggtgatcaacatcaccaccggcggcgcgccgaccatgggcgtggaagagcgcctgcaaccggtgatgcagttcaagccggaactggcctcgctgaacatgggctcgatgaacttcggcctgtacgaaatgctcaaccgctttaccgacttcaagcacgactgggagcggccgtacctggaagaaagtgacgaccggatcttccgcaacaccttccgtgacatcacccacatcctcaattcctgtgccgagaaccgcacccgtttcgagatcgagtgctacgacatcggccacctctacaccgccgcgcatttcctggagcgcggcctgctcaagccgccgttgtttatccagtcggtgttcggtttgcgtggcggtatcggtgggcaccccgaagacctggcccacatgcggcgtaccgccgaccgcctgtttggcgacgactatgtgtggtcgatcctcggcgccgggcgtgggcagattccactggcgaccatgggcctgtccatgggcagcaatgcgcgtgttggcctggaggattcgctgtgggacggcccgggcaaattggccgcgtccaacgccgaccaagtgcgacgtatccgcacggtgatcgaggccctcggccatcgggtcgcaacgccagatgaagcgcgggaaatccttgggctcaaggggcgcgaccaggtcaatttttaatccgaaaaccgccgcgtcacggcgcggcctgcatcccgcacaacaacaataaggggatcacaccatgcgtatcgaagtgcttgtcgacgtcaagaccaccctgggcgaaggccccgtgtgggacgtcgagcaacagcggctgtactggatcgacagcgccgacggccgcatcctgcgctgcaccgacgatggccgcgaactgcgcgcctgggaggtcggccagaaaatcggctccatggccctgcgccataacggtgagtcggcgattgtcgccctgcaaaacggcgtgcacaccctcgacctcaaaagcggcgggctcaacctggtcatcgacccggaaccgcacctgccggataaccgcctcaacgacggcaaggtcgaccgccagggccgctttatcttcggctccatggatacccaggaagacagcgccagcgccaggctttaccgcctggacgccgacctgagcctgcacaccctggacgaaggcatcatcgtgtccaacggcccgtgctggagtccgtcgggcgagaccttctacttttgcgacacctggtctggcgagatctgggcctacgactatgacctggccaccggcaatgtgcgcaatcgccgcaccctcgccaaggtcgacacctcgggcggtggcgctgccgatggctgcaccgtggatgccgagggctgtttgtggcaggcgctggtctatgccgggaaactggtgcgctacacccccgatggacaggtcgaccgcatcattcagatgccagtgaaaaaggtcaccagcctgacctttggcgggccgaatctggacaccctgtttgtgacctccatggccaagccgccgctgccgcgttttccggcagacggccagcagcgcggagcgctgttcgccattaccgggttgggcgtgcaaggaatagccgagcaacggttcgccagctagcgcgtgtgtgtgacaaggcatattccttcgcaaccttgtgtcagtgcgcgccctcgcgcgcctggagaggcccatggcaactatcaaaaaagcgtcgctgcgcagcattcaccggcattcctgggtgtcgctgctggtctgttggatgatctggatcctcaacgcctacgaccgtgagatcgtgttgcgcctggggccgaccatctccaagcatttcgatttatccgccgaccaatggggcaccgtggccacggtggtcatgctggccctggcgttgctggatatccccggctccatgtggagcgaccgctacggcggcggctggaaacgtgcgcgcttccaggtgccgttggtgctgggctacacggcgatctcgttcctgtctggcttcaaagcgttgagcggcaacctcgccaccttcattgccctgcgcgttggggtcaacctcggcgccggttggggtgagccggtgggggtgagcaacaccgccgaatggtggccggtggagcgacgcggctttgccctgggcgcgcaccacacgggctatccgattggcgcgatgctcagcggtatcgtcgcgagttttgtcatcaccgtgttcggcgaggacaactggcgctacgtgttcttcttcgccttcgtggtggcgctgccgctgatgattttctgggcgcgctattccaccgccgagcgcatcaccgcgttgtacgtcgacatcgccgccaagggcatgacgccgccggacaacgccccagccagttcggtgaagggcgaggcctggcgtaccttcgtcgccaccttgcgcaaccgcaatatcgccctcacggcgggcaatacgatgctcacccaagtggtgtacatgggcgtgaacatcgtgctgccggcctacctctacaacatcgccggattgtccctggccgagtcggcggggatgagcgtggtgttcaccctcaccggcattctcgggcaactggtgtggccgtcgctgtcggacatcatcggccggcgcaccaccctgatcatctgcggggtgtggatggcggcgagtgtcggcgcgttctacttcgccaacaccctgaccctgatcatcgtcgtgcaactgttgttcggcctggtggccaacgccgtgtggccgatctactacgcggtggcctgcgactcggccgagccgtcggcgacgtccaccgccaacggcatcatcaccaccgcgatgtttatcggcggcggcctggcaccggtgctgatgggcagcctgattgccatgggcggcggctggaccacgctgcatggctacaccgtgtgtttcttcgtgatggccggctgtgccctcggcggcgcgctgctgcaactgttttcccatcgcccccaggcgttggccctgcaactcgactcctagaacaacaccgatgcgccccccagcccgcctggcggggcgccaagaggaactgccgatgactaccgccaccgccgcccgcaccccgcaggcgttgaacaaactgatgttcgtcaagctgatgcccttgctgatcatcgcctacatcctgagcttcctggaccgtaccaacatcgccctggccaagcatcatctggacgtcgacctgggcatttccgctgccgcctatgggctgggcgcggggctgtttttcctgacgtatgcgctgtcggaaatccccagcaacctgatcatgcacaaggtcggcgcgcgcttctggatcgcacgtatcatggtgacctggggcctgatctcggcggccatggcgtttgtgcagggcgagacctcgttctacgtgctgcgcctgttgctgggcattgccgaagccggactgttccccggcgtcatgctctacctgacttactggttcaaccgtgaacaacgggcgcgcgccaccgggtatttcctgctcggcgtgtgcttcgccaacatcatcggtggcccggtgggcgcggccttgatgcgcatggacggcctgctcggctggcacggctggcagtggatgttcctgctcgaaggcttgccggccgtggcgtttgcctgggtggtgtggcgcaaactgccggaccgcccgagcaaggcgccgtggctgtcggccgaggaagcgcgcgggatcgaacagcgcatcgcccaggaaagcgaagagggggctggcgcgggcggtcactcgttgaagaactggctgaccccgcaaatcctgctggcgatctttgtgtacttctgccatcagatcactatttacacggtgatctttttcctgccgagcatcatcagcaaatacggtgaactgagcaccatgagcgtcggcctgctgacctccttaccgtggatcgcggcggcactcggtgcgctgctgattccgcgtttcgccaccacgcccgggcgttgccggcgcttgctggtcacgggtctgctgaccatggcgttgggcctgggcattgcctcggtgtcggggccggtgttcagcctgctgggtttttgcctgtcggcggtgatgttctttgtggtgcagtcgatcatttttctgtacccggcttcgcgtctcaagggtgttgcgctggcgggcgggctcgggttcgtcaacgcctgcgggctgttgggcgggtttgtcgggccgtcggtgatgggcgtgatcgagcaaagtaccggcaatgcaatgaatggtttgaaagtcattgcgttggtgctggtggtggcggccgtggcagccctgcgcttgcgcatggggcacgagcctgagcgtggcgcccaggccagcgaagcgtcctacacgtagacgccggcaacgggcctttctacactgcggcttgtcttggggaaaagggcaggcgccgatgaatcgcaatgaactacgcaaagccgacatcaacctgatggtggtgttcgaagcgctgatgctggagcgcaacgtgacgcgggtggcggagaagctgtttctcggccagccgaccatcagctcggccctcaaccgtttgcgtaccttgttcaacgacccgctgttcatccgcgtcggccaccgtatggagcccaccgcgcgggctgaggagatcatccagcatctgtcgccggccctggattcgttgtcatcggccttgagcctgacccacgatttcgacccgtccatcagcaccatgacctttcgcatcggcctctccgatgacgtggagttcggcctgttgccgccgctgctgcgcgccttgcgccaggaagcgccgcaagtggtgtttgtggtgcagcatgtggactactggcgtattcccgacctgctggcctccggcgacatcaccgtcggcatcacccagacccgtggcctgccggcaaatgccaagcgcaagctgctgcgccatattcgcccgcgcatcctgcgcgccgatgcctcggaaacaccgctgaccctcgacgaatattgctcacggccccatgtgctggtgtcccacaccgccaacgtgtcggggtttgccgatgagtggctggcggagatcgggcgcaaacgccatgtggtactgtcggtgccgcagtacagcgcgctgccggccttgctcgccggcaccgacctgatcgccagtttgccggactacaccgccgaggccatggcggtgtcgggccacctgttctgtgggccgttcccgttcgaaacgccgaccctggatttgtcgatggtctggctcagccacgtggacaccgacccggctgagcgctgggtacgttcgcggcttgaagcgtttatgagtgacagagggctggccagcaaagcctgatgcttttatccgtggtatatctaggaatcttcctaccaaagactcggagccatccatgccacacctgcacctggaatacaccgccaacctgacaggcctcgccgtcgagaagaccctgttgcggctcaacaacgtgctgatggcgtccgggcagttcggttccgagttcgatatcaaaagccgtgcggtcaaggtcgagacgttccaggtgggcacttccctcgacccgcgtgggtttatcgcagtgaagctgtcgctgctcagcgggcgctcaccgcaggtcaagaagcagctgtcggaaagcctgctggcagccctgcaggatctgggcgactggccggtaggtatccaggttcaactgagtgtcctgttggtcgatatggaccgcgacagctacagcaaggtcgccgtcggctaaggtttacaacaaaccctgatccgcacacaccttcaccacctgctcacgaaaccaggtattggcgctgtcctgttcgctggtttcattccactgcatctccagggtgaaccccggcaagccgttgggcgcttcgcaatggccgaacgtggtggcgggcgccagcagtttttgcacgcggcgcggcaaggtgacgatgaagtcggtgccggtgatcatcttcagcgctgcgctgtagctgttggcgcgggcgatcacttggcgcttgtgggcctggcgcgccagccagccatcgatcatgttggtgtcggaggtccacggcgtagggaacacatgacgccgttcgacgaaggactgcaggctgaaggccggttcccgtggcgctgagcgtttatcgaacacacagaccaggtcgtcttcgagcagcatctgggtgcggaagtccttatgggcgcggtggaaattgggaccgaagcagatcaccaggtcgaggcggccttcgcgcaggtcgtcggcggggatgtcggtttccaacttttgcacgttgacgatcaccggcaagtcggcacggtcgaagtgcttcaacaggcgcggcaggatcaactgttcgaagtattccggcgcgcacacattgaacgtcacggccttctgggtcgggtcgaaggcctggcctccggcgtggcacaggttgatgctttcgaggattttctgcacatgcccgtacatggtggtggccttatacgttggccgcatgcccgcccgggtgttgatgaacaactcgtcttcaaagctggtgcgcagcttcttcaggctgtagctcacggtggactggctgacaaacagtgtttcggacacctcggtaacgctgctctggtcgtagacggcgataaataccatcaagtcctgcatatcgagctttctgagcaagttactgtttagcatcggtttcgtccgtaaacctgttgtaccgaactcagtacaagacagcgcaaaagcttaacggaacgagcgtgccattagaaagctctgtagggcgtttctatgtttggtgtgagacaaatactgtttgcaacacgacctcagcggatatgtcgtgcgtagtgccttggattgaagcgcgtgacgatcagcagcatcagcacgatcactgctgtcagcgtccaccaggcccactcgaaactgcccagctgatcgcggatcatcccggcgatcagcggcgacagcccggcgatcaggtagccgatgccctgcacaaaggcggtgaggccaccggcgcggcgcgggttgtccaagtggtcgagggacaggatcaggctcatcgggaacaggccgccaatgcccaggcccagcaggcatggccacaacaggctcaggtggtgcgggctgagaatcaggccgcagaaacccaggatgatcaataccagcagcaccgtcaccacaccgcgtttatcctggcgacggttggcgatggcaggggtgaccaggccggagaccacttccatggccgtcaggaagcccaggagcaggccggcgttctgctcgctccagccttgctccacgtagtaaggcgccagccacgccagtacgcaggtgtaggacgcagtgcccaggccgaaaaatactgcgagcaaccaggcacggccattgccgaaaaacgactcctgcgggcccgcaccggcttgcggcaacggcggcaacaccgagcgttgcgcgtaccagaacaccaacgccagcaccgccaacgccgcccagatcgccaggccgatgcgccagctgtcggtctgcacttgcacgaacggtgcgaacgacgccgccagcgctgcgccgcccatgatcgcggtgacgtacaaccccatgaacagcgaaacattgtcactgaaccgcgacttgatcagcgccggcatcaacgcctggatcatcgcgatccccacgccggccgcgatagcgctgacgatcaactccagcgccgaatcgaggaacagccgcgacaacgtggccacgccaatcaccaacagggacaccacgatgctgcggtgctcgccaaagcgtttggccaggcccatgccgaagaacatcgccaagcccatggccatcaccggcaacatggtcagcaacgccgcgctgctgaaactcaacggcacatcgccgcgaatcgatgacaacaacgggccgaccgccgccatcgatgggcgcagattgagggcgaccagcacgacactgatcatcagccagatggcggtggtgggttttgcgtgaacggtttccatgggacgcccttgagtgaacaagggcgaatcaggccatgggcgggggagtggggcaaatgagaaagtcgctaggtctatctaaaaattgcgctggtcaaaatgtgggagggggcttgcccccgatggcagtgtgtcagccaacaaatctttgactgacccacctttatcgggggcaagccccctcccacattagatagagcggatcacatgcttgatctcctggaacgccgccaacccccacggccccagctcgcggccgatgctgctctgcttgtaaccgccccacgcggtctgcgggaagatcacttgcggcgcgttgatccacaccagcccggcctgcaaggcattcgccacacgctcggcggtttcagcatggcggctgaccacactcgccaccaggccgaaatcgctgtcgttggccagggtgatcgcttctgcctcagaggtaaaacggcggacacacagcaccgggccgaagatctcttcgttccacaacgcgctttccaggggtacgtcggtgaacaccgtggggcgaatgaaaaagcccttgggcaagtccgtcgggcggtcaccgccacacagcaagcgggcgccgtcttcgatgccacgctggatatgccccagcacccgctgatactgcgcgcggttgatcaacgcacccatttccacgtcatcggcaaacgggtctgccacgcgaatggcctcagcccgtgcctgcacacgcaccaggaattcatcggcgagcgtgtcagccaccaacacgcgactggtggccgaacacatctgcccggcgttgaaaaaaccgccgccacaggccagttccaccgccaggtccaggtcggcatccgccagcaccagcagcgaagacttgccgcccatttccaggctcacacccttgatggtttcggccgcgcgttgcatcacctgcacgccaacggcgttactgccggtgaacgatattttcgccacacgacggtccgctgccagcggtgcgccgaccgccaaacctgtgccacacaccaggttgaacactccagccggcaagccggcctcggcgataatccgcgccaagtgcaactcggccaacggcgtgacttccgagggcttgagcaccacgcagcagccggcggccagggccggggcgagtttccaggcggtggttaccatcgggaaattccacggcacgatcagccccaccacgccacagggctcacgacgcaggcgtgcgctgaagtcatcgctgggcagtgccaccggctggtcctgagtggcgtccatttcttcggcaacgctggcgtagtactcgaacgtggcgatcacatcgtccacatctatcgcggcttcaaacagcggcttgccgttgttgctcgactgcaggtgcatcagctgttcgcgctgctcgctcacgccctgggcgatcttgcgcagcagggcggcgcgatcacggccggtgctgttcgaccactcgctgaaggccgcgctggcggcgtcgaccgcctgggtcaccgccgccgcatcgccgacgctgacccgggccaataccgcctcggtggccgggttgatcacctcgagtacggcttggccggctcgccacgcgccgtcgatgtagatcccgttcgacaccacgctcataccgccaccttcttcatccacaggccttggtcgatttcaatcagtgttggcccctggcgatcagcggcgctgcgcagtgccgtccgcagatgcgcgatgccctggatgctttcagcggcacagcccaacgccttcgctacgccgataaagtccggcgtatagatgtccacacccaccggttcgatggcgcggttgaccatgtatttcttgatctcttcatagccctggttattccacagcagcacgatgatcggcgtgcgcgcctccacggcgctggccagttccggcaggctgaattgcaggccgccgtcgccgatcaggcacaccaccggttgcccgtcgccgcgtcccagccaggcgccgatagcggcgggcagggcgtagcccagggtgccgtagccagtggatgagttgaaccagcggcgcgggtggtcgaggttcagggtgaggttgccgctgtacaccggttgggtcgagtcgccgaccagcacggcgttgggcagctcctccaggacggtgttgaggaacagagtttgtgcgcgggtggcggcgtcccagccggggttcagttcggcccacagacgcgcaactcgcgcagcgccccaggtgctgttgcggggtggcaatggcttgctgttgagcgcgttcaacaaggcttcggcagcgatctgtgcatcggccaccaaggcaacctgcggcggatagttgcgcacggtctggtccgggtcgatgtcgatccgcagcaacgcgccgggaatctcgaagccgccggcgaaggtgacgtcgtagtcggtttccgccagctccgtgccgatggccagcaccacgtcggcttcggcgaccaaggcgcgggtggcgaccagggtctgggtcgagccgatcagcagcggatggttggccggcagcatgcctttggcattgatcgtcagggccaccggtgcgccgagtgcctcggccagttgtgtgagttctgcggcggcgtcgatggcgccgcccccggccaggatcaacggctgcctggccgccgcgagcaactggctcatctgcttgaccgccgagggcgccgcaccggcgcgtgccacgctgaccggctcgctgcccagcagcgcgtcggcgttttccaccagcacatccagcgggatttcaatatgcaccgggcgtgggcgcccggcctggaacaacgcaaaggcacgcgccaacacgccgggcaactcggccgccgacatcagggtgtgggagaacgccgccacgccggcgatcatcgcgccctggttcggcagctcatgcaacttgccgcgcccgccgcccaattggctgcgcgactgcacgctggagatcaccagcatcgggatcgagtcggcgtaggcctggcccatggcggtggtgatattggtcatgccggggccggtgatgatgaagcacacgccgggcttgccgctggtgcgcgcatacccatcggccatgaagccggcgccctgttcgtggcgcggggtgacgtgacggatgttggaacgggccaggccacgatacagctccacggtgtgcacgccggggatgccaaacacctggtccacgccatagccttccagaaggttgaccagtacttcgccgcaggtcgccataaacgtcgctcttattgttgagataaggcgttattggaccggctggccggtagcggcaacaatcgataaaaagtcatactagccatgtcctcacgtcatggctgcgccccgatgaaacgcctcccgccgctgcccgcgctgcacaccttctgggtcacggcccagtgctgcaacttcacccgcgccgccgagcaactgcacatcacccagggcgccgtgagccgccaggttgccgggctggaaagctacctgggctacacgctgttccaacgccaggcgcggggcttgagcctgaccgaagaaggccgcgaatggtcgctgcgcgcgcagcaggtgtttggcctgatcggcgaggcagtggagcagatcggcagtcgccgccaggtcctgcagctcaaggcctccacctgtgtgatgcgctggctgttgccgcgcttgatgcagtggcaaaaggcgcgcccggacgtaccggtggagctcaccaccaccgtggcctacaccgtggattttcgccgcgagcaattcgatgcggcagtgatctatgcgcctatcgccgagcagtcggccgaggcgcggcatctgttcgacgaacaactcaccccggtctgcacccctgcgatgctcggcgttctgcactccccggcagacctgcagcaacaggtgctgctgcaccccacgcgggatgaacgggattgggcgttgtggttgaaggcggcgaagacgcgcctgagtaacctgagccaggggcatcattttgaaacgctggatttggcgatgacggtggcgtcgcaaggctccggcgtggcgattggcgaccgtgcgttgattggcgaggatttgaaggccgggcggttggcgacgccgtttgagctgcgggtgccgacggggatgggctattacctggtgtatccaccgggcaccgagccttcggcggggcttgaagccttgatggattggttggtcagccaggccagaatctcctgacactcacatttcaaatgtgggagggggcaagccccctcccaaatctcagtagccgacggtaaaacgctggcgcgagtgcttcggcgattcgacttcgtcgatcaaggcaatggcgtagtcggcaaagctgatccagctgcgaccttcactgctcaccagcagatcgtcctggcccacgcggaattgcccggtgcgctcggtctcgacgaactccgccgaaggcgacaggaaggtccagtccagttccttttcttgacgcagcgtgtcgagaaacgctgcgcctgcactggcttcggctttgtactcagccgggaaacccgcgctgtcgatcacccgaccaccacccggcagcaacagcgaaccggcaccgcccacgaccagcaggcgtttcactccggctttcttcaccggcccgatcaccgcgctggccggcagggtggcgaagtgcgcggcgctgatcaccacgtcactgccgctgatggcctgttgcagggcgtctgcgtccagggcatccacctgcttgacggtaacgccagggcgcgccgccagcttgtcggtgttacgtgcgatggccaccacgttatgcccgcgacgcagggcttcttccagcagttggctaccggcccggccagtggccccaatgattgcgatcttgctcatgacgttctccagtacggttaaggtttgaaacggttcaccacttcatttcgcccttggcgactttggcgctcagttccagcgagccttcgtcgccgagggtcgggtaacgttttttcatggccgcgatcagggcggcggaatccttggccttggcggtttcggcgtcgaaggccttgatgtagtcagcggtaaatttcaccgattggacggacggcgtacccaggtagtgacccgggatcacggtgcgcggtttcaggttttcaatgcgttgcagggtggccagccagtctttgtgggattgcgcgctctgggtgtcggccatccacacatgaatgttttcggcgacgaccacgccaccgaccacggccttgagcgacgggatccacacaaaactgcggtccggctgcgcgccatccaggccgatcacctccagttgctggccttcgaggctcaggctgtggccttgaagtacctgcggcacgatggttttagacggcttgtccgcagccattttcgggccccagaactcaagcttgccggcgacggtggccttgatgtgatcgaccaccggttgcggcgccagcaccttggcgtcggggaaggcggtggtgagggtgtcaaggccgaagtagtagtccgggtcgccgtggctgatgtagatggtggtcaggtgtttgccgctggcgcggatcttctgcaccagttgctcggcctggcttttgccgaactgggcgtccaccaggatcgcatccttggcgccgctgaccagcaccgaggtgaccgggaagatcgcggcgtcgccagggttgtacacgtccagcttcagctcggcggcggccgcgtgggcggcgaaggccagggcggcggtggccagggtcaggcgcttgagggttgggaacatcgggcagctccagcatcggtaaaggatgcacagagcttagttgcacaaaaccagactaaaaatgcgatgctgggacatagtttgtttctgaaatcgggcaaatcatggaccgtctccaagcaatgcgtgtgtttgtcaccgtggtggacctgggcagtcagtccgccgccgccgatcatctggacctgtcgcgcccggtggtgtcgcgctacctggccgagctggaagactgggtcggcgcgcgcctgctgcaccgcaccacgcgcaagctcagccttacggcggccggcggcgaaaccctgccgcgctgccgacaattgctggaactgtgctgcgatatgcaagccgccgtcagcgagccggatgacgcgccccgtggcctgctgcgcctgagcgtgagcacctcgttcggccaggcgcaattggccgaggccatcgccgagtacgtcaagcgttacccgttggtgaccgtcgacctgcaaatgctcgaccgcacggtgaacctggtggatgagcgcattgacctggccatccgcaccagtaacgacctggaccccaatctcattgcgcgccgcctgaccctgtgtcgctcggtggtgtgcgcctcgccggcgtacctgctggcccatccggccccgcagaaagtcgaagacctggccgggcacaactgcctcacccattcctatttcggcaagagcctgtggcattttgaagagcagggtgagcacgtctcggtgcccatcaccggcaacatcacgtccaacgaggccagcaccttgttgcgtgtgacgctggccggggccggcgtgtcgatgctgcccacttaccaggccggtgattacatccgccggggtgaactggtgcgcctgctgcccgacgccgagccccggcagatgaacatctacgcggtgtatgcgtcgcgcaaacacatgccgtcggcgctgcgcagcctgttggattttctggtgctgaggtttccggaggagcctgcgtgggacgttggtctttaggacgacataaacctgttgaatgtcgtccgataatggcaactcgccctggttgacctatgctttaaacagcaccgtgtagatccgcagaggtctgtgccatgagcataaaaaccagaaagtacctgatgattgtcaccctgtgcgccatcgccagcgcgctttacgggaccgctgcctaccgtgttgaactgacccgcatgcagccgacttttgcgatcagctgccatcaggaccaatgcgtgccgcataccggcagtttcagtgcgctcaggtaaccggctgttcagccttgagttgctcacgaaacgccttgggtgagaacccgacccgtcggcggaacagccgcgagaaattggtcgggtcggaaaaacccagcacttccgacatttcattgatggtcatgctggtgtacgtcagcaggcgcttggcttccagcaattggcggtcgtgcatgatctgcagcgcgggctgcccacccaattcccgacaggtgccgttcaggtgtgagaccgagatgcccagcttgtgggccaagtcctcgatcttcgggtgttcgcggtaatgctgttccaccaattgggtaaagcggcggaagtattcacgccccctcggcgcccgtgggtggcgcttctggatggcctggcggctgatccataccagcaatacgctgaccagcgcgtgcatcatcatgtccctggccggttgttcgtcggcgtattcatcctgcaagcgggcgaactggttgttcaggtaatcactgtccttgcccgccgggtaactgcccagggactgaagaccgtccaccgtcgcccccagttgtgcctgcaggtggccgaccagcggtgccgcgagggtgaccacgtagccttcgacatcctcgggaaaccggaaaccgtgcacgcacagtgggggcaggacttgtagcgttgcttcgttcagcgtgctgcgctggccttcgatttccaactgtgcctggcctttatgcacatacaacaactggcacagatccgcgtgccggtggggctggatttcccactggtattcccgactgcgtcgagaaatggtttcgcagtgcaacaaatcgggggttggccattgctggttttccccgtaaagcttgaagaccggaatcgcggttttggtcatggtttcaatccgatacccaggagagtggtgcggtaatcgccccaattggcaaaaagcgcaggctttggctcagttttcaccttcttatgccggccactcaagtgaaaaatgtcagcaacaagaccaatgacaactctttcaccccatccgttcgggtggaacttgcgggttataagaataatgaaaacgctgaaaacccaagtcgccattatcggcgccggtccctccggactgttgctcggccaactgctgcacaatgccggtatccagaccctgatcctcgagcgccagagcgccgattacgtacaaggccgcatccgtgccggggtgctggaacaaggcatggtcgacctgttgcggcaggtgggcgtcagccagcgcatggacaacgaaggcctggtgcatgagggcttcgagttggcgctcaatggccagcttacccacatcgacctcaaggcgctgaccggcggccagacggtcatgatctacggccagaccgaagtcacccgcgacctgatggccgcccgtgctgccgcgggcgccatcaccctgtatgaagcccatgacgtgcaaccgcacgagctcaaaagtgatcggccctggctgaccttcaaacatcagggcgaagccttccgcctggagtgcgactacatcgccggttgcgatggctaccacggggttgcgcgccaatcgatcccggccgaatcactgaacgttttcgaacgggtctaccccttcggctggctgggtatcctcgccgatacgccgccggttcaccctgaactggtgtacgccaaacatccgcgtggcttcgccttgtgcagcatgcgatcgccgacacgcagccgttattacctgcaagtgccggtggaggaggcgcttgatgagtggtccgatgcgcgcttctgggacgaactgaaaacccgcctgcccagccaccttgcagccgacctggtgaccggcccgtcgatcgaaaaaagcatcgcgccgctgcgcagctttgtggtggagccgatgcagtacgggcgcctgtttctgctcggcgatgcggcgcatatcgtgccgcctaccggggccaagggcttgaacctggctgccagtgacgtgagtaccctgtatcggattctgctcaaggtctatggcgaggggcgggtggatttgctcgaacgctattccgccatctgcctgcggcgggtgtggaaggccgagcgcttttcctggtggatgacctcgatgctgcatcagtttcccgaggcggatggcttcagccagcgcatcgccgagagtgagctcgattacttcatccactccgaggccgggcgcaagaccatcgccgaaaattacgtcgggcttccttacgaagctatcgaatagcctgctatcgtatcgagcattcccgcgggccgccttttcccgcgggccctgctcgaaggtcttgccgtgacgcacctcaatcagcctgttccgccgctgcccgctgtgcgcagcatcctcgcctcactgatgatggcgatcttcctgggggccttggaccagaccattgtcgccgtgtccatgcccgcaatttccgcccggttccacgacgtcaacctgctggcctgggtcatctccggctacatggtggcgatgaccgtggcggtgccgatctacggcaagcttggcgacctgtacgggcgccggccgatgatgctgattggcatgggcctgttcaccctggcctcgctgttctgcggcatggcgcaaagcatggagcaactggtgctggcgcggatcctccagggcatcggcgccggcggcatgatctcggtgagccaggcgatcatcggcgacatcatcccgccccgcgaacgcgggcgctaccagggctatttcagcagcatgtacgcggtggccagcgtggccgggccggtactcggcggctacatgaccgagtacctgtcgtggcgctgggtgttcctgatcaacctgccactgggcgccggcgcctggtacgtggcgcatcgcaccctggtggggctgccggtgccgcagcgcaagccgatcatcgattacctcggcacgttgctgatgatcatcggcctcaccgctttgctgctgggcatcaccgaaatcggccagggccagcattggcgtagtgactcggtgctgggcttgctggcgtgtgcgctggtggcgttgacggtgtttgtctggcatgagcggcgtgcacgcgagccgttgttgccgatgcatctgttcgccaaccgcagcgcggtgttgtgctggtgcacgattttcttcaccagcttccaggcgatttccctgacggtgctgatgccgctgcgttatcaaacggtgaccggctcgggggccgacagcgcggccctgcacctgctgcccctggcgatgggcttgccaatgggcgcctattttgccgggcgcatgacctcggtgaccggccgttataaaccgatgatcctcagtggcgccttgctgagcccctttgcgattctcggcatggccttgagcgcgccccaggcggtggggctgacggcgatgttcatgttgctgtgcgggatcgccgccggcatgcaattccccacttcgctggtgggtacgcagaactcggtggaacaacgcgacatcggcgtcgccactagcaccaccaacctgttccgctccctcggcggagcagtcggggtagcgtgcatgtcggcgctgttgctggcgctgttgcaggactcgagcttcgcccacctggccagcggcgcgctggtggccgagggcagttccggcaatgtgctgctcgacggcctcaacgccgcccccggcccggcgcaggacgccctgcgcggggagctggctgtgaccttccggcatttgttgatggtgagtgcggcggtgtcgctgctggggctcgcggccgcaatcgcgatgcccaaccgggtgctgcgcggccgcgaagacaaggcacgctgagcgtgagtttcaagggctgtagtaacccaccgctaccatgaaatgcccggccttgcgcacatacgcgtgcttgttctcgaccttgtcggtcaccgggtttttccagcggtatttgtattcgccctggtcctgctcggccatcagcttcaggattggctcgcccaccggcttgccgtcggggtccttgatcttgctgaagtcggtgttgatcaggcgcaggttggtgccgtgcgccacatagcgctgggtatcgaggtcgaccacgaacacatagaggtcatcctgcaggaaaccgccttgcaacgaattgatggccttgagcgtgccggcttcatccttgagcagtgcgttcaccgccttgttgcgcagggccctggcctgttccggcgtggcccggggcaagtagtaacccaccgccaggatgcgttcgcccacgcgctgataaaacacatgcttgtgctcgaccttgccgtcgttccagttctgccagcggtaatcggcctgttggatgccctggccttcaggcaccgtcagcgcagccttgaatgactggcgcaactccggcccgagcacctcggatacatcgcgcccgatcaaggcggaggaggggccgccactggccagcagcacgccctgggtgtcgaccacgaagacatagcggtcgtggtcgacaaactcgccctggcgactgaacgcggcaaacgccttgtcgccattgctctggtagtacgccaaggctttttccagcagtgccttggcggcctgggcgtcctcatcctgagccgttgcggcgtgcacctggctgaaacacaacagcagcagccaggtgagtcgaagcagtgccttcattaccggtccctcgttcttgttggtgtgacaagagcgtagacggtcgtgggccactcagaagggtttggtcggcaggtacttgccatccagggtgatcaccgcgcgggagccgccgtccgggtcctcgactttcttgatgtccagcttgaagttgatcgcactgatgatgccgtcgccgaattgctcgtgcaccagggccttgagggtcgagccatagacctggagcatttcgtagaagcgatacatcgtcgggtccgtcggtataccgccggggaagctgccgcgcaggggcacgctttgcagcaggcggctggcgtcttggtccaggccgagtttgtcgcacaccacatcagcggcctccttgggcaacgggtgctggccgagcagggcggcggtgacgaacgccaggctcaggccggtgccgtcggtgaggtcctgccaggacaggttcttgcgcgccttgagctcgataacggtgtcggccagggccaggcgtggggtttgggcgaagtgggattgcaacatggtgtggtcctctggagttggaatagggtcaggccgcgtgaatctgatccagcagcgacacgaagccaccgctgcgttggtccagggcgtcgatggcgccggtctcgatgtcgtacacccagccatgcagggtcagccggccttgcccgagcgccagggcgaccgaagggtgggtcttgaggttggccagttgcgcgatcacgttttcgcgcaccaatgaactcaggcgggcggcgtccgaggcatgctcgcgggcggcgttgatcagcttggccgactcggcgtggcgcaaccagttggccacggccggcaggtggtccaggcatttgcaggtggagatcgcggtcatggcgccgcagtcggaatggccgcagatcacaatgtcgcgcacccccagcaccgccactgcgtattcgaccgtggctgacacaccacccggctccgggccgtaggacggcacgatattgccggcgttgcggatcacaaacagatcgccgggttcttgctgggtcagcagttcagggaccacccggctgtcggaacaggacacgaacaacgtgccggggttctgggtggtggccaggtgtctgaacaggtcgctgcgttggccgaaggcttctgactggaacttgcgaaagccgttgatgaggtcttgcatggggttctccttgcgtcgctgatggggcaaggatggaagttttcagctatagcgtccaagaccggcttattatggtttctataagtcatgcctatagttggaggcagtcgatgctgttgcgccatatccgatacctgctggccgtcgccgagcaccgcaatttcacccgcgctgccgaggcgctgcacgtgtcgcagccgaccttgtcgcaacagatcaaacagctggaagacaccctcggcgcgccgttgctggaccgctccgggcgtagcgtcagcctcaccgatgcgggtgctgcctatgtgcgctttgcgcgcctggccttgcaggacctgcaggcgggcacgcgggccatgcatgacgtacaggacttgagtcggggcagcctgcgcctggcgatgacgccgaccttcaccgcgtacctgatcggcccgttgctggcgcggttcaacgcccagtatccgggaatcaccctgagcatcgaagagttgacccaggaccgtatggaagccgcgctgaccgaggacctgctggatatcggcatcggttttactggcgagcatctgccggatatcgaatgcgaagggctgtttgccgaagcgttgagcctggtggtgggggctggccatccggggttagacggccggcggtggctggagcagccgatggtactgctcaacccaggcttcgcgacacggcgctacatcgatggctactgccgcgatcaagggttaaagccgctgattgcgatggaagccaactccatcagtgcgatcatcgaaatcgtgcgcaacacccacctggcaaccatcctgcccagtgcgattgcccaggcccagccgggtttgcgtgcggtcgccatcgaaccggcgttaccgcaacgcaccgtggcactgctcagccgccagggcgcctatcgcagcgccgcgtgccgggcctttgtcgcgttgatcaaggcgccgccagccactgattgacgatgccgtcgtacgccccggtggccacgctcaggtgcagccactggtcgacgtagctcttccacgccacgtcatcgcggggcagcaggaaggctttctcgctgtattgcatctgccgttcggggttgaccgcgcacagcccgggcttgagcttttgctggtaacgcgcttcgctggcgtcggtgatcatcacgtcggccttgccggccagcagttcgtcaaagatggtcacgttgtcgtgcaaacggatttgcgcctggcccagatgggcacgggcaaacacttcgttggtgccgcccgccggttcgatcacgcgcacattcggctggttgatctgctcgacactctggtaacgctgcacgtcggtacagcgcaccagggggatcttgccgtcgacgccgagggcctggctgaagaaggcttttttctggcgctccagggacaccgaaatgccgcccacggcgatgtcgcagcgctgggcgaggaagtccggcatcaggcttttccaggtggtaggcacccagtggatcttggcgttgaggctcttggccagggattcggccatggcgatgtcgatgccttcataagtgccgtcggcgcgcagcgaggtgtagggcttgtagtcaccggtggtgcacacggtgagcgtgccgcgttcgagcacctggtcaaggcgcgagggcgcggtgtcggccagggcgctggtggccaggccgagtacacacagggcgaaaagagctttcatgcggtcgagtccttggggcatggtcggggcggccattatttccagcgtggggcagggtggcaaggcacgataaatgtttagccaagttgcaaccaaactccgtcaaccctgaatttaaccgccctatgccggcgtgtgacgctggcagttatctctcgcactgtgatccccgcatggacggctcctccgacactcaccccgcgacactgccgtccgccctcgcgttctgggctttgttccactgccggcacgcccgcccaccagatagcgcattcctacgttgatccatcccctggatggcgtgcacctgtgcgcctgcctgacccctacgtatgagaatgcccatgagtgtttttgcctgcctgcaggaagcccagtctttcctcgaacaacacccggacatcgagatgttcgagctgtttatcctcgacaacaacggtgtgccacgcggcaagttgctgcaccgcgacgaactgctggcggtgtacgagagcgggcgccctttgcccagcaccatcctcggcctgaccatcaacggcgacgacgtggaaaactccgggctggtctgggaggtgggcgatatcgactgccgcgcctacccgatcagcggcagtctgcagcgcatgccgtggcggctgatccccaccgcggcggtgcaagtcagcatgcaccccaccgaaggcctgcccgccaccgtggccgaccccaggcatctgctggccaaggtgatcgacgggctcaaggccgacggttattacccggtgatggcggccgagctggagttctacctgctggaccagaaacccgacgccaatggccgcccgcaaccggcgcgtgatgtggacggcggtcggccgcgctcgacccaggtgtatggcctgcgcgagctggagcagatcgagccgttcctcgccgacctttacagtgcctgcaaactgcaaggcatcccggcgcgcaccgccatttccgaatacgcgcccggccaggtagagatcaccctggaacaccgcaccgacgccctgcaagccatggacgaagcggtgcgctacaaacgcctggtcaagggcgtggcgcataaacacgggatgaccgcctgcttcatggccaagccgttcgacgacctggccggcactggcatgcacatgcacgtgagcctggcggacgccgagggcaataacctgttcgccagcgaagccaccgatggcacgccgctgttgcgccaggcagtgggcggcatgctcagtaccttgctcgattcattgctgatgttctgccccaacgccaactcctaccgccgtttccagaccaacagctacgcaccactggccgccacctggggcgtggacaaccgcaccgtcagcctgcgggtgccgggcgggccggccaattcgcggcatatcgaacaccgtatctgcggtgccgacgccaatccctacctggccgctgccgcgatcctggccgggatccatcgcggcatccgtgagcaacgtgaccccggcgccccggtggaaggcaacggctatgcccaggccaagacgctgctgcccaccgactggctcaccaccctgcgcgcactggaggcttccagttgggcacgggaagcgtttggcagtgagttccttggcgtgtacctggcggtaaaacgcgccgaataccgccagttcatgggcgaggtcggggagcaagactggcggtggtatttgcatcaggcgtgatcgattgggtggcaatcacggtttcgacctttttttcacgttgcgctggttaagctgcgaatcaaggtcgttcactgccgttccacccatatgagcccgcgatgtcgccacacacgccttcctccatcgagattgaatacgccgagcgctgcggtcgtgagcacgccagggtctgcggcgacacgcgcccgcccgggctgacgcagcgcctggcggcctggcgcagtgagtggttggtgcgtcaggccttgaaggttgcgggtgagccgggcctgatcctcgacctggcctgcgggtcggggcgcttctggccggtgctggccgaacacgtcaaccgggttatcctggcgtcggacaactcccaggacatgctcgaccacgcgcttacccatcacgcggcggcgttgctcaagcgggtcaagacattccaggggtcggcgttttccatcggcttgtcggcgaatgcggtggactgcattttctgcctggaattgtttcgccatgtgcccagcagtgaagggcgccaggcgttgctgcgcgagtttcatcgggtcagccgcgactcggtgattgtctctgtgccttctcgtaccagcgttgaggacgagttccgccaggctggtttcaaggtcctgagtcatcacgagttcatgccgggctccaacgtgtggcgggtctacgttcttcgtaagagaggataactcccgcctgtcggactattcttcatctcctgtctgagttttcatggtcggctgtgcactgcggatgctcgctagcccctttcgcgatatatactgcgcgccattcttcaagggagagccgtgtggccatcgatattcactggatctgcgacaacgatagcctcggccagcattgcgccgaatggcagcagttgccattcgtcgccctcgacaccgaattcatgcgggtcgacaccttttaccccattgccgggctgatccagatcggtgatggcgtgcgcgcttacctgatcgatcccctgaccatcgacaactggcaacccctggctgcgctgctggagaacccggcggtgatcaaggtgctgcacgcctgcagcgaagacctcgaagtgttgctgcgcctgaccggcagcctgcccgcgccgttgttcgacacccaattggcggcggcttacctgaacctcggtttctccatgggctactcgcgcctggtgcaagccgtgctggacatcgagctgcccaagggcgagacccgttcggactggctgcagcggccattgtccgagacccaggtcagctacgccgccgaagacgcggtacacctggccgaggtttatacgcggctgcgtccgcgattgacggacgacaagtacgcctgggtcctggaagacggtgccgagctggtcgcgaacctgcgccgcgaagtcgacccgtacgaggtgtaccgcgacgccaagctggcgtggaaactgtcccgcgcccagctcgccgtgctgcgtgaactgtgtgcctggcgcgagcagcaagcccgcgtgcgtgacttgccgcgcaaccgcatcattcgtgaacactcgctgtggcccctggccaaatcccagccggacaacctcgccgccctgggcaagatcgaagacatgcacccgcgtaccgtgcgtcaggacggccagttcctgctggacctgatcaagcgtgccggcagcgtgcccatggaccaatggccgcccgccgttgccgagcctttgccggtggatgccgccgcactgatcaagcaactgcgcgctcttggccaggctgaggccgaacgcctggacatggcgccggaactgatgctgcgcaagaaaaccctcgaagccctggtcaagagtggctaccccgatgggccttaccaattgccagactcgctgcgtggctggcgccgcgagttgatgggccaggcgctgctcgacagcctggccaccgccggagaacagccttgaaacgtatttgctccatctaccgcagctccaaacgcaccggtatgtacctctatgtgctcaagagcgatgcccttgaacgtgtgcctgaagcgctgatcacgattttcggcaagccggcccacgcgttcgacctggtgctgacccccgagcgcaagctgcaacaggaagacatcgtgcaagtcctggaaaacctcgacaaacagggctaccacctgcaaatgccgccggccgaggacgagtacatcgaacacttgcccgaagagctgttgcgccgcaacgacccgatgtgatcgaccggtgccccatccggggcactcgcttcaatggaatcgtataagtgggcggtggccgtaaggatgcgggcggccgtccgtagtgtttttgaaaggttttatgcatgcgcgttctgattgctgaacaggatcacccgctctacgcccaattgctcggcgaagcggcaccggaccttgaagtgctgaccagcggcgactcggccgaactgtcgcgcctggccgccgattgcccggtatggctgggccagccggacctgttggccacattgttgcgccagggtcaccacccgcaatggctgcaatcgacctgggcaggtatcaccccgttgctcgccgagggcctgccgcgtgattatcgattgacccgtgccgtgggtatttttggccaggtcatggctgaattcgtgctcacctacatgctcggccacgagcgcgaagtgctggcccgcctggtcagccaggtcgagcgtaaatgggacaatcgcatgggccagagcctggcgggacgcaaggcgttgatcgtcggcaccggcgatattggccagagtgttgctgagtttctcgtgccgtttggcgtgaagctgtacggcatcgccagttccgcacgcgagcaggcgccgtttatcgaagtggccgggctcgaccagttgggccggctggtgggcgaggtggactacgtgatcaacctgctgcccaacacgccgagtacccacgatctctacgacgcggggctgttcaagcaattcaagccaaccgggctgttcatcaacgtcgggcgcggcgtggcggtggtggatgccgacctggtcgaagcgctgaaagaagggcacctggccggtgcggtgatcgacgtgtgccgccaggagccgctgccgcaacgtcatccgttctggacagcttgggggttgctgctgaccgggcacagctccgcgccgacttcgccggcattgatggtggagttgtttgtgcaaaacctgcgggcgtatcaggccgggcaagacttgcgcgggaacgtggatttcgagcgcggttactgacagcagaggagccggcatgccggctcctcttggcattacaggctgaagtcaccttccgacaccagctcgctcagtggcttgcgcgggctcggtgcttcacggccttgcaggtactccggcaggctcgatttgtcccccagcttgccgaccgccacggcggcatgcagcgcataaccttccgggatcttcagctctttgcgggtcagttcttgatcgaagccggccatgccgtgggtgtgccaaccgctgaggctggcttgcagcgccaggtggccccaggcggagccggtatcgaaggtgtgccacagcgccggggtttcttccgtggcgccgggggcggtgaagtcggttttcgaggcgatgatcaccagggccgacgcatgttgtgcccagccacggttgaattcattcagcaaacccaggaagcgctcccagtccggcgtgtcgcggcgtgcgtagagaaagcgccagggttgcgagttgtaggccgagggtgcccagcgtgcggcttcgaagaaactcagcagggtttccttggagatgctctcgccggtgaaggcgcgaggcgaccagcggtcggtgaactgggtgtggatcggatagtcggcaacacgtgtcatggagcagttcctgatcgtcaattcggccctcaaagctactgtgcagtcactagactgacaagtgttgtgacaccgccagtcgtaagcgcttggatcccgcagccgtgggcactagactggcggccttttcacctaccgatactgatgtagagccatggccgccaaagtcgaacctttctggatacgcaaaaccctcgaacacctcgaccaggaggaatgggagtcgttgtgcgacggctgcggcctgtgctgcttgcaaaagcttgaagatgaagacgacaacagcgtctattacacgcgtatcgcctgcaaactgctcgacctcaagacctgccagtgcaccgactaccccaaccgccgtgcgtcggtgcccgattgcatccagctcaccccgggccaggccgaccagttcaaatggctgccgcccacctgcggctatcgcctggtcagcgagcgcaaggacctgccgttgtggcaccacctggtctgcggcgaccgcgatgccgtgcatcatgaacgcatttcccagtccgggcgcatgctcagcgaaggcagcgtgcccgaggacgactgggaggattacctgattttccgcgcgggctgaaaggggagtgtgtatgagggtcggaaccaagctggcggcaagcctggtgttgttggcactgagtcagcctgggtggtgcgcgaagaaagtcgacctggattatcacgtcaaactgctgccccagagcgatcaggccgaggtacgcctgagcctgtcccagggctcggcggtgcgcagcctgaacttcgacctgggccgcgacggtgactacagcgacttcaaggccgacggccagtggagcgtcaaggagcaccgtgggctgtggcaacccagcgccgacaaggccagcctgacctaccgcgtacgcctcacccacgcgcgcaaaccgggtatctatgaagcgcggatgacacccggctgggcgctgtttcgcggcgaagacctagtgccgacggcgcggctcgaccagcaggacggcgtcgagttggtctcgcgcctggtgttcgaactgccggccggctggaaaagcgtcgaaaccgcctggccgcgcatcggcaagaacaagtttcgcatcgacaacgtgtcccgcctgttcgaccggcccaccggctggatgctcgccggcaacctcggcagccgccgggtgcgcctgggcgaaaccgaagtcaccgtggcttcgcccaagggccaggccatgcgccgtatggatgtgctgacgttgctgaccttcgtctggccgcaggtggaaacggcgttcccgcgtcacccggccaagctgctggtggtcggcgccagcgacccgatgcgtcgtggtgcgttttcggcgcatgactcgatctacctcaacagccgcacgccgctggtcagcgaaaacggcggcagcccgctgattcgtgaagtggtgcaggcggtagggcgtttcaacgatcacgacaccagtgattggatcagcgagggcttgggcgagtattacgccatcgagctgctgcgccgcgccggcggcatcaccgatgagcgttaccaggcgatacaggcgcgcttggcgaaggaaggcaaggacgtgaccagcctgcgtggcgagcacgtcagcggcgcgacagtgtcacgggcggtggtgctgctgcaggaactggatcgcgagatccgcgtgaagactcataacaagcggtcgctggatgacctgacgcaagcggtgatgcgggccagccgcatcaccacggcggagtttgtgcagttggctgaaagcatcatcggcgagtcgtcggtggtgctggacagtaagctgctacgttagacgctggttttggtggccttctcggccgccacttcagccttggtcttcaagttctttagctccgcgccggcccgctcgattttcgtacgtaccgtgttcatttcctggcggccctgttccagcttgtccttgagcgagctgtgcccggtaaagccacgggccagcgccacaccgccgatcgccacctggatcaaaccgaaaatcccgcctcggcgcaggcctttgccgaccatcatcacgccacccgccaccgagccgatgcgctcccaaccgtgcacgttctgctttggctgagtctcgaagggggtgtgttcgatgataggtcgcaaggttttgctgtcgctcatgatctgtctccaacaagggctattgataagtagctgactgcccgcagacgccggatgttcccgaaatatcagtacttgggacccgaacgggtgttgttgcccttggccaggcggtcgtagagcaccacgttgacggtggctgcaaggttcatgcaaccagtggtcgggatgtagaccacgtcttcgcaccagtcgcggatctctttatccagcgaaccgtcttcggggccgaaaatgtacagcgcacggtcggggtgggtgtactcaggcagcgggcgggcgccttccaccagctccacggcgacggggatgcaacccaggggcaggatttttttcaggtcatcgatgccgatcagcggaatgtcgtggtggaccttcttggtgtcggtgatgaagtcccgggcgcgctcgtagcgcacgccggtgtagaacaccgaggccacgccgtagcaaccggcggcgcgcatgaccgaaccgacgttttcgggggatttggggttatacagaccgatgcagctgtagcgtttattgcccacggggaagggtgccttggagaaaaacggcgattatacggccttggggggatgtgttgcttggacgatcgccatcgggggcaagccccctcccacaccaggcctgcgtacgcaggtcagaatgtgggagggggcttgcccccgatgagtccggtgctaacaacaatggactatcagtcgtctttcttcatcaaccccgccaacgccgcaaacgggttatgcgtggccttggcaattgtcgggctgctggtggagccttcgccgaagtactgctggtcggtgtagcgcgagtgttcgttatcgtggcagtacaggcacagcaattcccagttggaaccgtcctggggattgtcatcatgattgtggttacggtggtgtactgtcagttcactcaggcgtttgccggagaactcacgggcgcagcggccgcacacgtgggggtacattttcaaggctttgtcgcggtagcccatttcccggtcgcgctgggcatcggcaaggatgcggtccagcttggcggtgtgggagggcgggttggtcgagctcatcatggctcctggctatttggtggttcacggatagtgttgattctagccgctcgcgacgtaaataaccgcttcactttactcataaggatctgaaacgcatgcgtctgcattcatggactgttgcactgttgttgtgtggggtagttgcccacgcccaagcgttctccacgccaaaacccgggcaggtgatcgaggtggccctcgaacaactgcacccgacccaggctgtggtgggctttgaccagatttactacagcctgggcctgttcgccgacaaacccgccaaggtcttcgatgaatactgcgagaccaacggccagggcgaggctgacaacgtgcccaagggcgcggacctgcaccagccgtccagcttcacctgccaggacccggtcggtacccatcccgacgaaatgaaaaccgtggtggtcggccccggcggccagctctacctgaccgacggtcaccacagcttcaccaccttgtgggaggtgccgggcggcggcccccgcttgaagatgtgggtcaaggtcaccgatgacttcagcaacagcccggacatgcagagcttctggcagcacatgcaagcggcgcgcaaggtctggctcaaggacaagcagggccagaccctgccacccgagcagttgccggcacacctgggcttcaagaacctgcaggacgacacgttccgcagcctggtgtatttcacccgcaaggccgcctatggcaagccggacgcgggagaggtcgcaccggagttcctggagttctactggggcaattggctgcgcactcaaattgacctgggcaagtacaacctgaacaagaagggcggttacaaggacgccattgaagccgtcgccaagcgtatggtcagcctggcgccgggttcacaggtgggcgatagcgggtttactgcccatcagctgggaggcatgacaaagctcgaccgtaacgagctggaaaagactttcgacaaaaaagtgccgtacgtgatcgattaccgcaattccctgcgctagccgatcacgccttctgtgcaatccagatggtatgccgcgtgcccttgttaccatgggcaaacacctgcacttcctcggccttgaaaccggccttgcgcagtttgtcgctgaacagcttgtccgcgctggccgaccacacggccagcacgcctttcgggcgcagggccttggcacaggcggccaggcctccggcggagtaaagccagctgttggccttttgcgtgaggccttcggggccgttgtccacgtcgagcatgatcgcgtcaaagccctgaggttcggcctgcagcaccttggccacatcctccaggcggatcaccgtgcgcgggtccagcaatggccggccggatttttcccccagcggcccacggttccactccacgacacccggcaccagttctgcgacgaccacctcggcggtcttgcccaggtgtttgagcgccgaggccaaggtgaaccccatgcccaggccaccgatcaacacccgcgaatccgcacgaccggcaactctgcggcagggaatttccgccagcgcatcctcggaaccgtgcatgcgcgtgttcatcaattggccgccgtcaccgccctggatcttgatgacaaaatcttcaccgtattcgaacaggcacaaggcaccgccattgtcggggatcggggtggtgtccagcagaacgaaacgtttcatggaaatctcattgggaagggcattcttgcgcggttgggagtagccttgtgacattccggtcaggccatggagccatcgatgaagtgcagcattctaacggtcattgtgttgagcgcgctcgcattgggtgcggcgcaggctcaggagttgcaaaccgtaccggtcgcgcccgccccgacgccaggcgcgccgggcaccccgacgccgacgttgtacccgcaagtcaccccgccggcggtgcccaagaccaacggctcgccaccgttggtgcccatcgtgctgccgacgccgccgaaggaccagacggtgcctggcctgctgcagaacgacggcaagccgaagtcgccgggcggttaaaactgctgggacagtaactgcccatccgccatgcgcaggcgcttggacagggcgatggcaatcgcgcggatgatcttggcggcaaccctgggcgcttcgttgagcatcttttccagggagtcccggcccaggttcagcagcacacagtcgctggccgccacgcagctggcggaacgccgctcgccgtcgagcaccgccatttcgccaaaggcccggccactgcgcagggtggcgatggtcaggcgctggccgtcatgattggttttctgcaccgccacctggccactgtggaggatgcacatgaaggtgccggcgtcgccttcgaggaaaatcacctcgtcacaggcaatgctgctgatgttgaagtaaccggcggcgacgtgaaaatcttccggcaacagcgggtcgaacaggccgcaatccatgagcatgtcgcggatttcggtattcattaaggtcggtagtgccatggctgcaagcttgatccatcaatcagtaggcggtcctgtgttcagacaggaccgcccggctaagttccttaaaccagccccagcgccttgaacacaaatccatattcgagcgctacgtcacgtaatccctggtaacgaccgctcataccaccgtggccggcgcccagttcggtcttgagcaacagcaggttgtcgtcggtcttggtgtcgcgcaacttggccacccatttggccgcttcccaatactgcacgcggctgtcgttgtagccggcaatcaccagcaggtgcgggtaggcctgggcgctgacgttttcgtacggcgcataggccttgatgcgctcgtacacttcgggttcttgcgggttgccccactcgtcatactcggtgatggtcaatggcagctcggggtcgagcatggtgttgagcacgtcgacgaacggcacttcggcaatcgccgcctggaacagcgccgggcgctggttgagcaccgcaccgatcaacaggccgccggcgctgccgccgctgatcaccagttgcctggacgtcgtcaggccctcggcgatcaagtgttcggcacaggcgataaagtcgctgaaggtgttctgcttgtgctcctgcttgccgttgcgataccaggcctcacccagctcgccgccgccgcgcacatgcgcaatggcaaacgccacgccccggtccagcaggctcaggcgggcgtgggagaaccaggggtcgaggctcgaaccgtaggcgccgtagccgtacaggtacagcggtgtcggcttgccgagctggtcgcgcttgaccaccaggctgatcggcacctgggtgccgtccgccgaggtggcccacaggcgctggctcacgtagtcgtcggcattgaacacgccgagcaccggagtttccttgagcacctgttgcgtgccgctggccagttccagttggcgcacctgggccgggcggttcagggcttcgtagcgcaggcggatcctattgctggcaaattccaggctgttttgtacgtagaggctgtaggcggcgtcgggcaattccacgcgatacaccggcaggccttccgggtgcacctcgatcaccggcaggccgccgatgcgcaggctcagggtcatggcgctggtgttgaggctgatgccgtcgagcatcacttcgtcgttgtgggggatcagggtctgccattcgccttcggtcggcacatcgccaatgtcggtggccacgaacagcgcgtagttgatgccatcgcggttgctgcggataaaccaggtccacgcgccattcagctgaccgtgatcgacatcgtattcatggtcctcgacccgtggcgccaggcaggtgaaatccaggtgcggctgttcggcatccagcgcccagacttcgctggtggtcttgctgcccagcgacagcagcaactggcgctcggagctggagcggtagcaatgcaggaagaaacggccatcgggctcgtggaacacttcctgcgccgccgtgccatccaggcgatagcgatacaacttgtgcgggcggtgcgtgtcgtccagttcgccgaagaacagcgtcaggctgtcattggcccaggtcatgctgccgtcgcagtcttcaaacgccagttcgctgaccttgccggtggccaattccttcacgtacagggtgtagatctcttcgccactggtatcgaggctgtaggccaggcgctggtggtcggggctgatgctgaacgcgccgagggagaagaaaccgccattggccagcacgttggggtccagcaacagttcttcgctgctgtcgtccacctggttgctgtcatcggccgggcggcggcagcggtaatggcgggcgtactcgtcaccggcggtggtgcgcgtgtaatacaagtacggcccccacggcgagggcagggacaggtcggtttcgagaatgcggcccttgatctcttcgaacaggctgtcgcgcagcgccttctggtcggcgagttgcgcttcctgccaggcattttcggccttgaggtaatcgagcacctcggcgctgtcgcgctcttgcagccaggcatacggatcggggccttgggccttgcgggcaatcggagcagtcgatacaggcataggattgatctctatctggcagacggtggcaggcattgcagccgcgacacgcaaaagccgttatcatagccgcctgtttgccaaccttgccatggacaccatgaccgagaacgactatctgaccgcttggggcctttacgccttcgccgctttgggctgcctgctggtgtggtggcgcatgacccgctggatctggcgctggcttcgcgagccgctgcaattgctgatggcggtgctgctgttgagcccgaccatcgtcgatccggtcaagacccagttcgcgccggcggtggccatcaccgccctggacctggtgctcaaggtcggcaacaacgcctggcgggccatttccgatctgttcatgtacagcatgatcgcctttggcgtgtacctcgtgtttgtgctgatccgctggccgatcgagcgcgccgccaaggcccgccgcgagcgcaaggccgccgccgatgcggccctggccgccgagccggatcaagatgaagacgacgtgcccttccgccgtcctgcacccgtgagcggtatgcgcgtcgaaccgcgcctttaacgtcgtccgccctgcagcgagagccctggcatgtgtgaattattgggcatgagtgccaacgtccccaccgacatcgtgttcagctttaccgggctgatgcagcgcggtgggcgcaccggcccccaccgtgacggttggggcattgcgttctacgaaggccgtggcctgcgtctgttccaggacccggccgccagcagtgagtcggaagttgcgctgctggtgcagcgttacccgatcaagagcgaagtggtcatcggccatatccgccaggccaatgtcggcaaggtcagcctggccaatacccacccgttcgtgcgcgaactgtggggccgcaactggtgcttcgcccacaacggccagttggcggatttcaacccccgcgccacgttctaccggccggtgggcgacaccgacagcgaagcggccttttgcgacctgctcaatcgcgtgcgcgaagccttccctgaaccggtggaccttgaaaaggtgctgccggacctgatcgccgcctgtaccgaataccgcagcaaaggtgtgttcaactgcctgctcagcgatggcgactggctgttctgctattgctcgaccaaattggcgcagatcacccgccgcgcaccgttcggcccggctcgcctgaaagatgtcgacgtgatcgtcgattttcaggccgaaaccacccccaatgacgtggtgacggtgatcgccaccgagccgttgaccgacaatgaaaactggacccgctacgaaccgggccaatggagcctgtggcgacgcggtgaatgcgtcagccagggtatcaccgagtaaggatatcgcccatgttgctcagttatctgcggttggtgctgtttgcgattggcctgctggtcggcgtgcaggtgccggggtttatcaatgactatgccaagcgtgtcgaagcgcacctgatcgaggcccagaccggcctcagcgggtttgaaaacaccgcacgccagttcttcaacggcgatttgaaagccttggtggcgcattaccgcgccagtgatgacccggtgttccagagcgacgccaacagcctgggcgccatgcttgatcgccaggtggcgttggacaagcaattccaggccatgcaaggcccttggtatatccgggccctgcaagtggcggtggcggctgacccggatatccgcctggaaacctggaacggctacagctaccagatcctgttgacgcctgaggccatgggctggggattgggcggggcaatgctgctgtcgtttggcctggaatgcctgttccgtctgatcgactgggtggtgctgggcggcaagcgcctgcgccagagtcgaccgatcgaagagcgcgacctcaagggcctctgagacaaactgtgggagggggttgcccccgatggcggtggatcagtcactgatgcattgactgacaccctgctatcgggggcaagccccctcccacagttttaatcctttgtcttcaatgaggttgtgtgctcagtagcatgcgctctacgccaacctcttcggcataccgcgccaccaccttctggcacaaccccacaatttcttccaccaactccacccccacgcgccacgacaccaccacctgcagattcggcagtttctgcgccatcggcaacatcaccaactccccgcgcgccagttcttcgctgaccaataccggcggcaacgcgccgatgccgaacccgtcgcgtaacaggcgggtaatggccgacaccgaattcacgcagttcatgcgtggcgcggccacgccgttggcttgcatcaggctgataacgtcctggtgcggatgggagtttttcgagtaggtgatgatgcgctcccgggccagttcggcgagggaggcgtagtcgcggttgtagatcgactggctggcgacgatccaggccatggggtggctggccagttccaggctgcgtacggtttcgaggcgcagcaggtcggtttgcaggatcaggtcgaggaagcctttttgcagctgatcgctgaggttcagtgcagtatcggctaccaattcgatttccacgagggggaagtggtccatcaattccgccaccaacgggctgagccaggtgtgaatcaccgtgtccatggcgccgatccggatgcgcccgaccttgctgctggtggtttccagggactgcttcaaaccctgcatggtcaccatcatctgctcggcgtaatccagcaccttcaagccttccggggtcaggctcacgccacgcgaatctcgcagaaacaacttcacgcccagctcgctttccagcaccgcgatgcggctggagattgatgcctgggtggtgaacagcttctcggcggtcaggcgaaaactcttgagcttggccacccagacgaaggtttcgaggaacttcaaattcatgggatcaactttttcttatgcatggatcggtttttattagttggacgcggcaccgggccagcgccaaaaatcgagccattccacgataagcgccgttggggtgtcaggacaagttgcgaattctgcgtaaaaaatcccacactacaaaaaaacaaagcctacaggagcgacagtccgtgagccgtcttctactcaattgcgacatcggcgaaagctttggcaactggaccatgggtctggatgcggaagtcatgccgttcatcgattgcgccaatgtggcctgcggtttccatgccggtgacccgagcatcatgcgcaagaccgtcagcctggcgctcaagcatggcgtgcaagtcggtgcgcacccggcgtaccaggacctgcaaggcttcggccgccgctccatggcttacaccccgcaggaaatccaggacctgctgcactatcagattggtgcgctcgagggtatctgccgtgcccagggcggacgggtcagctacgtcaaaccccacggcgcgatgtacaacgacatgatggccaaccctgtgcaattgcgcgcggtgatccaggccgtggcggcctacagtgaactgccgctgatgctgctcgccacccgcgacaacagcgctgcccaggcgctgggcgatgagtacggcgtcaccctgtggtttgaagccttcgccgaccgcgcctacgacaacaacgggcacctggtgtcgcggcagttgccaggcgccgtgcaccatgattccgacactatcgtgcaacaagccctgaccatttcccgtggtgaagctttaattgccagcgacggcagcccgctggtcctgcaagccaataccctgtgcgtacacggtgacaacgccagctcggtcgcggccgtgcagcgcattcgcgaggcattgaagccagcatgaagccacggattgaagtggtcgccatcgactgcctgatggtgcgtctgtttgatgcaatcgccgagaccaacatgccgtggatgctcgccgctacccagcgcctgcgcagcgggtttggcgcggcactggtggacctggtgccgtcctacaccaccttgatggtgcattacgatctcgttgcggtgaacccggcccaggcgcgggaactgatcgaccaggccctcaccgacctgcagccgcaggcccagggtggcggccagtgccatgtgctgcctgtttggtacgacctgagtgtcggcccggaattgaccttgctcagccagcgcagcggcttggcgatcgacgaagtgattcgccgccacagtgcccacgaataccaggtgtttgccctcggcttcgcgcccggctttgcctttatgggcctggtggatgaaatcctcgccacccctcgcctcagtaccccgcgcaaacgcgtggcggccggcagcgtcggcatcgccgaacggcaaaccgccgcctacccggtggtgtcgccgggcggctggaacctgatcggccgcacgccggccaggctcttcgaccgcgagcgcgacggctacagcctgatgcagcccggcgacacggtgcgtttcgaggcggtcgagcgtgctgaattcatcaagctgggtggcgatgacacgccgttggagtcgcaggcatgagccgcttattgatcgaggccagcacgccgctgtgcctgttgcaggacgccggtcgctttggcgtgcgccacctgggcgtgacccagggcggggcgctggactgggtgtcgatgtcctgggccaactggctgctgggcaatgccctggacgcgccggtggtggaaatcaccctgggcggtttcaccgtgcaggccgaggactattgcctgctggccctggccggtgcggacctgggcgcgtctatcgacgaacgtgccatcagccctggacgcagttttatcctgcaaaagggccagcgtttgcgctttacccagccgttcagcggtgcgcgggcctaccttgcggcaccgggcggctttgacgcgccggatgtgctcggcagttgcgccacggttgtacgtgaggaattgggcggggtggacggttttggcagggcgttggccgaaggcgggcgcctcgtttattcgggggcgggcggggccatgaaggtactgagtgaaccccaattgccaaccggcgcatcactggatgtcatcctcggcgcccagatcggccagttcagcggccaaagcctgttcgatgccttcaacagcgattggtccctggacagccgcgccgaccgcatgggcatgcgtttgttgggtacacctttgcagtaccaggggccgtcgctgatttccgagggcattcccctgggcgcgatccaggtgccgccggacgggcagccgattgtgttgctcaatgatcggcagaccatcggcggctatccacgcctcggggcactgacgccgttgtcgctggcgcggctggcgcagtgcttgccgggggagacggtgcgcttggcgccggtggtgcaggagacggcgcaccagcagcacatcgactatttgcgccgatttacgtaacaccgcatttagaaggtgggagggggcttgcccccgatagcagtgtctcagtcaatacatcagtgactggaccaccgccatcgggggcaagccccctcccacattggatctcctacagtattgggggcggcgtttatttggagagaaaccgcatgccttcttccagcccgcgcagcgtcagcgggtacatctgatcctccaccaactcccgcacaatccccgtcgacgccgtatacccccacgtgtccttcggatacgggttaatccagatcagctttttgtacttggccatgaagcgctgcatccacacatacccaggctcctcgttccagtgctcgacgctgccgccggcctgggtgatctcgtacggtgccatcgacgcatcgccgataaagatcactttgtaatcggctccgtatttgtgcagcaaatcctgggtcgaggtgcgttccgaggtgcggcgctggttgttcttccacaccgattcgtacacgaagttgtgaaagtagaagtactccaggtgcttgaactcggtcttgcacgcggagaacagctcttcgcagatcttcacgtgggcgtccatcgagccgccgatgtcgaacagcaacagcagcttgatggtgttgcgccgctccgggcgcatctggatattcagcaagccggcgtcgcgggcggtgtggtcgatggtgccgtcgatgtccagctcttccgccgcaccctggcgcgcaaacttgcgcaggcggcgcagggcgaccttgatgttgcgcgtgcccagttccacctgatcgtcgaggttcttgtactcgcgctggtcccacacttttacagccttgccctggcgcttgccggcatcaccgacacgaatgccttccgggttatagccgccggagccaaacgggctggtgccaccggtgccgatccacttgttgccgccggcgtggcgttctttctgttcttccaggcgcttcttgaattcctcgatcagcttgtcgaggccgccgagggattggatctgcgcgcgctcctcatcggtcagcgaacgttcgaactctttgcgcagccactcttcgggaatcaacgcctgcaagtggtcgtcgagcttctccaggccgttgaaataagcaccgaaggcccggtcgaacttgtcgaaatgccgctcgtccttgaccaggatcgcccgcgccaggtagtagaactcgtccatgtcggcgaaggtcacgcgctgtttcagcgcgttgatcaggtcgagcaactcgcgcaccgataccggcaccttggcggcgcgcatctcgttgaacaggttgagcaacatcagcgattaccgcgacggctcatgaacgccagacgctccagcaactgcacgtcttgctcgttcttcaccaacgcaccggccagcggcgggatggccttggtcgggtcgcgctcgcgcagcaccgcttcgccgatgttgtcggccatcagcagtttgagccagtccaccagttcggaggtggacggttttttcttcaggccgggcactttgcgcacgtcgaagaacacgtccaacgcttcgctgaccaggtctttcttgatgtcggggtagtgcacatccacgatcttttgcagggtggcgcggtcggggaaggcgatgtagtggaagaagcagcggcgcaggaatgcgtccggcagctctttttcgttgttagaggtaatgatgatgatcgggcgtttcttggccttgatggtctcgtcgatttcgtagacgtagaactccatcttgtcgagttcttgcagcaggtcgttggggaactcgatatcggccttgtcgatttcgtcgatcagcaggattacccgctcttcggactcgaacgcttcccagagcttgcccttcttcaggtagttgcgcacgtcgtgcaccttgtccacacccagttgcgagtcgcgcaggcggctcaccgcgtcgtactcgtacaggccctggtgggccttggtagtggacttgatgtgccaggtgatcagcctggcgccgaaggactcggccaattgctcggcgagcatggtcttgccggtgcccggttcgcccttgaccagcagcggccgttccagggtgatggcagcgttgacggccagtttcaggtcatcggtagccacataggcctgggtgccttcgaacttcatcggtgtttcctcgcattcatcaatgccgggactataccgcgcagccccggcgactgtgaacgcaggtgggttattcagtctctgaatgaccggtcacattcaatccgccgagggcttgggttgttcgtaccgcgcattgaacgcctggataaagccgttgcgtaaaatcgccaaaaacgcggagaacgcgctgacattctgctggtgcacgctgccactgagttcgacgcgggtcgcgaactggtttttgctctggtttttcagcacggtttcgctggcaccgaccacggcttcccagatcgagcggaagatgttcttgtctttgttttccacgtcctgctgccagtcgaacacttcgacatcgcgcagcaacggcttgatataaccagtcaattggcctttgtccgcctgggcttcgattaccacatcaccggtgccggccttgaagtcgaacttgccgtaagccgaggcgaagtcattcatgcgcttgagttgcaggtctttggcgcggaagcggaactcgaagttttcgaaattgctcagcgggtcgaaggtggcgctggcttccaggggcgcctggccctggagcagggccttgccgtcgaagcgggcgtcgcgcttgccttggacgtcgacgatgttggtcaggttgtagaagctggcgttgaccgaggttgcattcaggttgaccggtggtttggagctgaagttgtggaaggcgatcttgccgtcttcgatgcgcacttcatcgagtgtgatgggcgccagcttgctcaactgctcgcgccagtcggtgcctttaccggtctgggacgcctgcttgttggcgccgccgtcgacgaaattcacctcggggttgatgaacagcaccttggccaccaccgcatggtcgtaccacagcgagtgccagctcaccgccaggtcgatcagcggcgccttgacgaacggtaccggcaccttgccgtcgaccttgatgatctgcaggccgttgatcctgtaggcgccgcgccacagggccaggtcgacgtcggtgacctggccacggtagtcgcccatgtcggcgagcttgttattcaggtagttgcgcaccagatagggcagggcaatgctcagggcgaccagtaccaccagcaatccggcaacggtccatagtggccagctgtagcgacgtttcatggggagggtcctctgtccgtatggggagtggactgttgcgatgggcgcaacgttcctccgactggacgcttggcggcacgaggcatacccttgttgccttcctgaataccgccaataggacccgtcatgagccgcatctttgcagacaacgcgcactccatcggtaatacgcccctggtgcagatcaaccggatcgcgccgcgtggcgtgaccatcctggccaagatcgaagggcgtaacccaggctactcggtgaagtgccgcatcggcgccaacatgatctgggacgcggaaagcaccggcaaactcaagccgggcatgaccattgtggaaccgacttcgggcaacactgggattggcctggcgtttgtcgccgctgcccgtggctacaagctgctgctgaccatgccggcgtccatgagcatcgagcggcgcaaggtactcaaggccctcggcgctgagttggtgctgactgaaccggccaagggcatgaagggcgctatcgaaaaagccggcgaaatcgtcgccagcgatccggccacttacttcatgccagcccagttcgaaaacccggccaacccggccatccacgagaaaaccaccggtccggaaatctggaacgacaccgatggcgccgtggacgtgctggtggcgggggtgggcaccgggggcaccatcaccggcgtatcgcgctatatcaagaacatcgcgggcaagccgatcctgtcggtggccgtcgagccgatcgtgtcgccggtgatcacacaggccctggccggtgaagagatcaagcccagcccgcacaagatccagggcattggcgccggtttcgtgccgaagaacctcgacctggcgatggtcgaccgcgtggaactggtgaccgacgacgaatccaaggccatggcccttcgcctgatgcaagaagaggggatactgtgcggtatttcctgcggcgcggcgatggccgtggccgtgcgcctggccgagaaaccggaaatgcagggcaagaccatcgtggtgattttgccggactccggtgagcgctacctgtcgagcatgctgttcagcgatttgtttaccgagcaggaaaaccaggcttgatgtatgtcagcgccaataccttgggccttctgcatactggcccaagtgtttatcatggccggctgctacgtctgctgttggccaggcgcttatttccaggagttgctgcatgaccttttctttggccgccaagctgtcggtgctggcgttgtttatcggcagcacgctgtacgtgcatctgcgcggcaaggcgcgtttgccgatgttgcgtcagttcgtcaaccattcggcgctgttcgccccgtataacgccttgatgtacctgttctcggccgtgccgtccaagccctacctggaccgcagcaagttcccggaactggacgtgctcaaggacaattgggaagtgatccgcgaagaggccatgcacctgttcgacgagggttatatccgcgccgccgaaaagaacaacgacgccggtttcggttcgttcttcaagaaaggctggaagcgtttctacctcaagtggtacgacaaaccgctgccatcggccgaggcgctgtgcccgaaaaccgtggccttggtaagcagcatccctaacgtgaaaggcgcgatgttcgcgttgttgccgggcggtagccacctcaacccgcaccgcgacccgtttgccggttccctgcgttaccacctgggcctgtccacgccgaactccgacgactgccgcatcttcgtcgacggccaggtctacgcctggcgcgacggtgaagacgtgatgttcgatgagacctacgtgcactgggtcaagaacgaaaccgaacagacccgcgtgatcctgttctgcgacatcgagcgccccctgagcaaccgtctgatgacccgcgtcaaccgctgggtcagcaagcaattgggccgcgcgactgcgccgcagaacctcgatgacgagcgcgtcggcgggatcaaccaggcgtatgcctggagcaagaccttcagtgacaagttcagcggtgtggtcaagcagtggaagcgcaagcatccgaaggcttaccgcattgcgcggccggtgttggcggttgtcgtattggtcctgctgtggaaatggctgttcggctgatttgcaactgttagcacggtcaaaatgtgggagggggcttgcccccgatagcggtggatcaggcaaaaatgcttagcctgacacgctgccatcgggggcaagccccctcccacatttgatcacctttgatctttagctggcgatcaactggcgcagcacatagtgcaggatgccacccgacttgaagtactccacttcattcaacgtatcgatccggcacaacacgtcaaccttctccgtactgccatcctcccgcgtaatcaccagcgtcaggttcatgcgcggcacgatctccacatcgctcagcccgagaatgtcgattttctccttgccggtcagcttgagcgacttgcggttctggtccagcttgaactgcaatggcagcacgcccatgcccaccaggttggagcggtggatgcgctcgaagctctcggcaatcaccgccttgacccccagcaggttggtgcccttggccgcccagtcgcggctggagccggtgccgtattcctggccggcgatcaccaccagcggcgtgcccgacgcctggtatttcatcgacgcgtcatagatcgccatcttctcgccagtggggatgtacagcgtattgccgccttcctcaccgccgagcatttcattgcggatgcggatgttggcaaaggtgccgcgcatcatcacttcatggttgccacggcgtgagccgtaggagttgaagtcccgtggctccacgccctgttcgcgcaggtaacggccggctgggctgtcggtcttgatattgccggcgggggagatgtggtcggtagtcaccgaatcgcccagcaacgccagcacgttggcgcccttgacatctttgatcaccggcaacggccctgcaatgtcatcgaagaacggtgggtgctggatgtaagtggagtccttctgccacacgtaggtcgccgcttgcggcacttcgatggcttgccattgcgcgtcaccggcaaacacttcggcgtattccttgtggaacatgccggtgctgacctgggccacggcgtcggcaatctctttgctgctcggccagatgtccttgaggtacaccggcttgccgtcttgatcgttacccagcggttcgctgctgatatcaatgcgcacggtgccggccaaggcatacgcgacgaccagcggcggcgatgccaaccagttggttttcaccagcgggtgcacccggccttcgaagttgcggttgccggacagtaccgacgccacggccaggtcggccttctggatggccttctcgatcggctcgggcaaaggccccgagttgccgatgcaggtggtgcagccatagccgaccaggtcgaagccgagcttgtccaggtactgggtcaggccggccgccttgtagtagtcggtgaccactttggagccgggggccagcgaggttttcacccagggcttgcgggtcaggcccttttccacggcctttttcgccaccagcccggcggccatcatcacgctggggttggaggtgttggtgcaggaggtgatcgcggcgatcaccacggcgccgtttttcaggcgataggtctggccgtcgtattcgtagtcggcttcgcccaccaggtctgcattgcccacggcaaccccgccgccgccttcgctttccaggcgaccttcttccttgttggtgggtttgaattgcaggtcgaggaagtcgctgaaggcctggcccacattcggcagggctacgcggtcctgtgggcgcttcggcccggccaggctcgcttcgacgctgcccatgtcgagggccaggctgtcagtgaacaccggttcctggccggcgttgcgccacaggccctgggccttggtgtacgcctcgactaacttcacggtttctgccgggcgccctgacaggcgcaggtagtccagtgtcacctcatccactgggaaaaagccgcaggtggcgccgtactccggggccatgttggcgatggtggcgcggtcggccaacggcaggtcggccaggccgtcgccgtagaattcgacgaacttgcccaccacgccctttttgcgcagcatctgggtcacggtcaacaccaggtcagtggcggtgatgccttctttcagtttgccggtgagcttgaagccgatcacttccgggatcagcatcgacaccggttggccgagcatcgccgcttccgcctcgatcccgcccacgccccagccgagtacgccaagaccgttgatcatggtggtgtgggagtcggtgccgaccaacgtgtcgggaaacgcataggtgcggccgtcttcgtccttggtccacacggtgcggcccaggtattcgaggttgacctggtggcagatgccggtacccggcggcacaacactgaagttgtcgaaggcgctctggccccagcgcaggaaggcgtagcgttcgccgttgcgctgcatttcgatgtcgacgttctgctcaaaggcgtcggcgttgccgaacttgtcgaccatcaccgagtggtcaatgaccaggtccacgggcgatagcgggttgatgcgctgcggatcgcccccggccttggccacggcggcgcgcatggcggccaggtcgaccacggcgggtacgccggtaaagtcttgcatcaacactcgggcggggcggtactggatctcgcggtcggactggcgttccttgagccaggcggcgatggccttgaggtcggcgccggtgacggtcttgtcgtcttcccagcgcagcaggttttccagcagcaccttgagcgacatcggcagcttgtccaggtcaccgaggctcttggcggcttcgggcaggctgaagtagtggtaggtcttgtcgtcgatttgcagtgttttaagggttctcaggctatcaagggatgacattacatgactccttatggtccgcacggctacggacctgacgggacgaacagagctatcaacttagccctgttttcattagcaggctaataactggactctatcgttaagtccaaggttccgaagtccgttatcatgcgcgggttttcatgacaggcattgcgacagcgcaaggtcgttgattcacttggagaattgatgaacaccctttttatgcactgccgcccgggttttgaaggcgaagtctgttccgagatcgcggaacacgccgcgcgcctgaacgtttccggctacgccaaggccaagaccggcagcgcctgcgccgaattcgtctgcaccgaagaagatggcgcccagcgcctgatgcacggccagcgctttgccgagctgatcttccccaggcagtgggcgcgcggggtgttcatcgacctgccggaaaccgaccgcatcagcgtgatcctcgcccacctgcgcgaattcccggtgtgcggcagcctgtggctggagatggtcgacaccaacgacggcaaggaactgtcgaacttctgcaagaaattcgaagtgcacctgcgcaaagccctgctgaacgccggcaagttggtggacgacccgagcaagccgcgcctgctgttgaccttcaagagcggccgcgaagtgttcatgggcctggccgagtcgaacaactcggcgatgtggccgatgggaattccgcgtttgaagtttccgcgtgaagcgcccagccgttcgaccttgaagctggaagaagcctggcaccacttcatcccccgcgaccagtgggacgagcgcctgcacggcgacatgactggcgtcgacctcggcgcggcgccgggcggctggacctggcaactggtcaaccgtggcatgctggtgaccgccatcgacaacggccccatggccgaaagcctgatggacaccggcctggtccagcacttgatggccgacggcttcaccttcgtgcccaagcagccagtggactggatggtctgcgacatcgtcgagaagccggcgcgcaacgccgcgctgctggaaacctggatcggcgaggggcattgccgcgaggcggtggtgaacctgaagttgccgatgaagcagcgctacgccgaagtgaagcgcttgctggagcgcattgaggacggcttcaaggcgcgtggcattcgcgtggagatcggctgcaagcagctgtaccacgaccgtgaggaagtgacatgccatttgcgtcgattggaaacagcgaagaaacccaaggctcgctgaacagttgaaatcaccacaggacccctgtgggagcgggcttgcccgcgaaagcggtataacagtcgaaacttatgttgaatgtgcccgtgtcttcgcgggcaagcccgctcccacctttggagcggcatccgtttcaggagtgatgtatgaacctcgatttgcccgtcgacgccaccctcgacgccaccggcctcaactgcccggagccggtgatgatgctgcaccagcacatccgcgatctgccgcccggcggcctgctcaaggtgatcgcgaccgacccgtccacgcgccgcgatattcccaagttctgcgtgtttctggatcacgaactggtggatcagcaggaacaggccggtacgtacctgtactggatccgcaagaagtctgcttaaccctgcgctttatctacgcggatgcgccggcgcgcactgcgcgccaggcgcaccagcagcatccccgcggcgcagctcaggcccacgatcagcccttgccataagccgctcgggccgctcggttcgccgagccagtcggtcaggcccagggcataacccaccggcaggcccacgccccaataggcgaacagggtcagcaccatggtgacacgggtgtcctggtagccacgcaaggcgccggcggcagtgacctggatcgaatcactgaactggaacagcgctgaaaacacgatcagcgtggatgccaggtggatgacgatcgggtccggggtgtagatcgccgcaatctgctcgcgcaacagcagcatcaagctgcatgaaaggcacgcgtaggccagcgccgtgcccatgccgacacccgcggcgaagcgtgcttcacgcggttcaccacggcccagggcctggccgacccgtacggtgaccgccatgctcagcgagtagggaatcatgaacaccagcgagctgacgttcagcgcgatctgatggcctgagaccaccgtggcgccgaggctgccgatcagcagggcgatgaccgcgaaaatgctggactcagcaaagatcgcgatgccaatcggcaagccaatcccgagtacgcgcttgatcaccgcccattgcggccagtcgaagcgcttgaacaactcgctgctctggtacgccgggccgaagcgtgtccacacggccaggccaatcaccatcgcccacatcgaaagggccgtggcccagccgcagcccacgccgcccatggccggtacgccgaggtggccgtagatgaagatgtagttcagcggaatattcagcgccaggccgaccaggcccatgaccatgctcggccgtgtgcggcccaggccgtcgctgaagcagcgcagcacgtagtacagcgcgatggccggcatgcccgaagcgatgccgtgcaggtagcccatggacggtttgatcaggtcggcctcgaccttcatccagtgcaggattggttccgcgcacaacagcaacagcccgcctacgatgccgaccacaatcgccagccacagcgactggcgcaccagtggcccgatctcgctgaatttcccggcaccgtagcgctcggcgacttttggcgtggtggccagcagcgtgccgctcatcagcaggtacaccggaatccagatcgagttgcccaggcccaccgccgccaagtcttgggggctgacgcgtccggccatcaccgcatcgacaaaactcatcgccgtcgtggccagttgaccgatcatgatcggcagggcaagcgtcagcaggccgcgcacttcccggcgaatgcgggcggggcgggtaaggggggcggtggcagtgttcacgtacaggtgtccagtcgagggcagcgcaaggacggcggattctacgcgctgacgcatcggtcaggaaaaaacctgtgttagcgatttgtaagcgagggctgcgatccctgtacactgcgggtccgcctaaggagcctgccatgctgattgttgccgacgaaaatattccgctgctcgatgcctttttccagggtttcggtgaaattcgccgcgtgcctggccgctccattgacagtgcgacggtcgagcaggccgatgtattgctggtgcgctcggtgaccaacgtcaaccgtgccctgctcgatggcacgaacgtgcgctttgtcggcacctgcaccatcggcaccgatcacctggacctcgactacttcaaacaggccggcatccagtggtccagcgcccccggctgtaacgcccgtggcgtggtggattatgtgttgggcagcctgatgacgctggccgagatcgaaggcgccgaccttaaccagcgcacctacggcgtggttggcgccggtgaagtcggcgggcgactggtcaaggtgctcaagggcctgggctggaacgtgctggtctgcgacccgccccggcagatcgccgaagacggcgattacgtcagcctggcgcagatcatcgagcagtgcgacgtgatcagcctgcacacaccgctgaccaagtccggcaacggctccacctggcacctgttcgaccgccagcgccttgagcagctcaagcccggtacctggctgatcaacgccagccgtggcccggtagtggacaatgctgccctgcgcgaggtgctgctggagcgcgaagacctccaggcggtgctggatgtgtgggagggtgagccggaagttgacgtcgacctggctgatttgtgcgtgctggccacgccgcatatcgctggctacagcctggacggcaagcagcgcggtacggcgcagatctatcaggcgttctgcgcgcacctggggcaggagccgagcattcaattgcgtgatttgctgccaccgccgtggttggccgaggtgcagctgaatgcgtctaccgacccggcttgggcgctggcgacgctgtgccgcagcgtgtacgacccgcgtcgtgatgatgcggatttccgccgcagcctggtaggaacggtggacgagcagcgcaaggcgtttgacctgctgcgcaagcactaccccgagcgccgcgagatcgatggtttgaaggtgcgcatcctgggtgagtcggctgtgttgtcgaacatcgtgtccgcgttgggcgccgaagcggtttagagaccaataaaaatctatggtcacccccatttttgcaatactgattaacgggtggtgtggttggcttgcttaaatctatccggcgtctgtttggggcttgccccagcgccacgatgagagtcgcg

SEQ ID NO: 27 - DNA, 299796 bp, Pseudomonas nodulensis
  misc_feature (2412)..(2470): n is a, c, g, or t
tatgtttgccgagatcgatcccgatcagtgctgactcgctcatgatgatggcctccgaaaacaaaacaccctgtgaaagcgtagccctcacagggtgttgggggtgaccatctcattaacccggccaccagggccgggtttgaaagagcgtgggcgcttcagccttgctgggcaggcttgaccagtcgctgttccagttcgctgcacgcttgctggatcatctcttcggtgatctgcacttcgcggccttgggcgtcaatgtacgagcaaggcaactgctgcggctggcggatcacttcaatcttggcatcgctgctgttctgcaaggtcatggcctgtctcctcatcaggttgtgtacctactctaaagcccgcgcgtgaccaggctgttacaactccctgccaggtcagcggttcgaacactcagtccaccagaaaccaatacaaatttccagccaggggttagaccgatagcctctagggatcagcatcggcgggcataattaacctgactcattgctattcgcccaagttccccccatgtaggtgtacagacttctcattggtgatgctctccatgttctcagtccgtcaacgccgtgccattcgcctggccagtcgattcatcgcgccttaccgctggcaggcgcttggcgccctgttggcgctgatcgtcacggccggcatcaccttgtccatggggcagggcatccgcctgctggtggaccaggggttcatgacccagtcgccgcacttgctcaaccagtccatcgggctgttcatgatcctggtgctgggcctggctgtcggcacctttgcgcggttctacctggtgtcgtggatcggcgagcgggtggtcgcggatatccgccggcaggtgttcaatcacctgatctacctgcatccgggcttttatgagaacaatcgcagttcggaaatccagtcacgcttgaccactgacactacgctgctgcaatcggtgatcggttcgtcgctgtcgttgttcctgcgcaatgccttgatggtcatcggtggcatcgtgctgctgttcgtcaccaatcccaagctcaccagcatcgtggtggtggcgctgccgctggtgctggcgccgatcctgatcttcggccggcgcgtgcgcagcttgtcgcgccagagccaggaccgcatcgccgatgtgggcagctatgtgtcagaaaccctcggccagatcaagaccgtgcaggcctacaaccaccaggtgcaggacgaacagcgcttcgccgtcaccgtggaagatgccttcaccaccgcacgcaagcgcatcacccagcgtgcgtggctgattaccctggtgatcatgctggtgctcggcgccgtgggcgtgatgctgtgggtcggcggcatggacgtgatcagtgggcgtatttccggcggcgagctggcggcgtttgtgttctacagcctgattgtcggcagtgcggtcggcaccctcagcgaggtgcttggcgagctgcaacgtgccgccggtgccgccgagcgcattggcgagttgttgcagtcgagcaacgagatccaggcgccggtcgccggcactgtccagttgccggcgcgggtcagcgggcgcatggagctgcaggacctgcgcttttcctatccttcacggccggacagctatgccatcgacggcctgaacctgaccatcaaccctggcgaaaccctggcgttggtcggcccttccggtgcgggcaaatcgacgatcttcgacttgctgctgcgcttctacgacccccagcaaggccggatcctcattgaaggccacccgctgaccgaactcgaccccatggacctgcgccgccacttcgccctagtgtcccagagcccggcgctgttctatggcagcgttgaagagaacatccgctacggcaacccggcggccacccaggaacaggtcgaagcagcggcgcgcattgcccacgcccacgatttcatcctgcaaatgcccgacggttaccagacccacctgggcgacggcggcatgggcctctctggtggacaacgccagcgcttggccatcgcacgggcgttgctggtggacgcgccgatcctgctgctggacgaagccaccagcgccctggatgcgcagagtgaacacctgatccagcaagcgctgccgcaattgatgcaggggcgcactacgctggtgatcgcccatcgactggccacggtgaagaacgccgaccggattgccgtgatggaccagggcaagctggtggcggtggggacacatcagcagttgattgcgagcaatgcgttgtatgcaaggttggcggcgttgcagttcagtgacggggccgaggtcggaaaaagcgaacgttaacgcggcctatgtggtgaacaagcttgttgtggcgagcgggcttgccccgcgttggnnnnnnnnnnnnnnnnnnnnnnnnnnnnnnnnnnnnnnnnnnnnnnnnnnnnnnnnnnnccaacgcggggcaagcccgctcgccacaaatgccagcttggccctcaggcaatgaactcactgatcatcaaaataccgctcatgccaatccaccaacggctgcggtgaattgagcttctgcccgtagatcaccgaataagacagcacgttctgcacatactggcgggtttcgtcgaacggaatgctctctacccacacatcgaagctcaggtggtcggcgccgcgcagccactggcgtacacgaccggggccggcgttgtaggcggcggaggcgagtacgcggttgccgttgaactggctgtgcacttggctcaggtaggcggcgccgagctggatgtttttgtccgggtccagcacctgggccggggaggccagggggatgctgaacttgcgtgcggtttccttggcggtgccgggcatcagttgcatcaggccgctggcgccgacgccggagcgggcgtcgtccatgaaggcgctttcctggcgggtgatcgcgaacacccagctcgaatgcaggccgcgcaccttggcttcacgcaccagggtatcgcggtgggccatcgggaaacggatgtccaggtcgtcccagtactgcgcctggctgatggtgcggatggctgggaagtaccacttcatgtcgtaggccagcttggcctgggcgaccatttcgtcgcggttgaagtgacggctgacgtggtaccactcacgacggccatccaccacctggccgcgtgcatagaactccagggcgcggcgcacgcccggggtattgcgcactttgttgaccagcgcctggctcatcagcaggggtttgttcttcaactggtacggggccttggagcgatcggcggcaaggaaaccgtagaagtcacgctcctgcgccaggtgcttgtacaagaccagcgcttgcgggttcttcggctcggccagttccaggctgcgggcctgccagtagcgccagcggttggtggtggccaggtcttgtggcagtttgcgggtcaactggtaggcatcttcccagcgggccaggcgcagcagcaggcgcaggcgccactcggacacggtgttgtcgcgcaactcgggatcgtacttggtcatcacctcaagggcgcgcgggtcatagcgcttggccagggtgaggccgatttcccgggcgatcgacactttttcgtcacgggagaagtgcatgctgctggcgtagccgtcgagcagggccatggccttgtccggatcctggcgtgccaggcggcgcaggcccaggcctacggcgtcggacatggcctcggtggccggcaggaagcgcgaggggtcgctgagcatgtccggcttttgcgccacgtccaccatcaggcggccttgcgggcccagcgtgcgcagggtttttaccaggctgttggccagcgcgtagttgcgcgcttcggcggcgagtttggcgcggtcccagatcttctgttcggtgagttggccgtcagccgcccattggccaaaggtgacatcgcaggcagccggttgggacttgcctgtcatccagagtttttcggcggtcttgtagccctcggccttcagattatgggtgagctggtactggccgtgcaggcagtccagttcgacgaaattgagcttggcatcgtagtacttttcaaaggtctgccagtcgccgcgttcggccagccagcgcaaccagcgcagtttcatccagttggcctggggcaggtcgccgtttttggcgaggaactgctcgatttcctggttgctcgcggttttcaggcgggcggtcagttcgtcgtaggccagatagggtgtcaacgggtagtcggccagggcctggctgtattgcatgtacggcccggtatcgcccttggccagggcgcgtttggcttcatcgtagtattgacgttgggtggtgaggtccacggcctgggcggattgaacggcggtggcggaaagaagcagacaagataaaaagctgaaaaggcgactgcgcatgagacgtccgtgcagaggaatctggacaagtgccggcatcgccgacactgattgcccctagcttagccttttgcctgacgccggtgaaagctttgacggccgcttcgttcaagttcctcggaaatgtctctcagagtatgtcgactgagaaaatcccggccgcctcagcccctaactcaggtagaatgcgcgcccagtttttggagaagcgtatgaccctgctcaaattcagcgatgtgtcccttgctttcggcgccatgccgttgttggacaaggtgtcctggcagatcgcccgtggtgagcgggtgtgcatcatcggccgcaacggcaccggcaaatccagcatgatgaagctggtcaagggcgaccagaagcccgatgacggctccgtatggcgcgcgccgggcctcaagatcggcgaattgccgcaagaattgccggtggccgacggacggacagtgttcgacgtggttgccgaaggcctcgacggcgttggcgcactgctcgccgaataccatcacctggcacagaactgtgtcaccgaagatgacctgaacaagctgatgcacgtccagcaagacctggaagctcgtgatggctggcgcttgcagcaattggtcgacagcaccctgagtcgcctgcaactgccggcggacaagaccctcgccgagttgtccggcggctggcgtcgtcgcgtgctgctggcccaggccctggtgtccgagcctgatttgctgctgctcgacgaaccgaccaaccacctggacatcggcgcgattgcctggctggaagaagcccttaaggaattccagggcgccgtgctgttcatcacgcacgaccgttccttcctgcagaacctggcaacgcgcatcctggaactggatcgtggtggcttgatcgactggaacggcgactacgccagttttctggtgcacaaggaagccgcgctggccgccgaagaaaccgccaacgcgctgttcgacaagaagctggcccaggaagaagtctggatccgccagggtatcaaggcccgtcgcacccgtaacgaaggccgcgtacgcgccctgaaagccctgcgtgttgagcgcagcgagcgtcgcgagcgtaccggcaaggcgaatatccagctggacaccgccgacaagtcgggcaaacaggtgatggtgctggagaacgtcagcttccatcacccggatggcccgttcttgatcaaggacttttccatggtcctgcagcgcggcgaccgtatcggcctgctgggcgccaacggtactggcaagaccaccttgctcaagctgatgctcaacggcttgcagccgaccagcggtaaagtggaggagggcacgcggatcgacgtggcctacttcgaccagttgcgccatcagttggacctggaaaagaccgtaatcgacaacgtcgctgaaggccgcgactttatcgatatcgacggccagagccgtcacgtgctcagctacttgggcgacttcctgttcagcccgcagcgtgcgcgtaccccggtgaaagccttgtccggtggtgagcgtgcgcgcctgctgctggccaaactgttcagcaagccggccaacctgctggtcctcgacgaaccgaccaacgacctcgacgtggaaaccctcgagctgttggaagaagtgctgctgaccttcaacggcaccgtgctgatggtaagccacgaccgggcattcctcgacaacgtggtcaccagcaccttggtcttcgaaggtgagggcaaggtgcgtgaatacgtgggtggttaccaggactggttgcgccagggcggttccccgcgtttgctgggcgtgaccgagagcaagtccggcaaggccgacttgacctccgccgtggtggctccggtggttgctgctgcaccggcgcaggacgccgcgccggcggccaagaagaaactcagctacaagctgcagcgggagctggaggccttgccgggtgatatcgacgccaaggaacagcagattgccgcggtagaagcgcaaatggctgacgcggggttctacctgcgtccggcggcggaaacggccaaggtcatcgcttccctggagaaactgaaccaggagctggaagtgttggttgagcgttgggctgagttggatgcctgagtgatctcagcgcattaaaaaagcccggcgttcattcgtatgaacgccgggctttttatatcggtcttaaggggcttttaccagcttgacggccagcacatcgcacggcgcgccatgcaggacgtcattggcggtggatcccagcaacagcgccaaaccatgacggccatggctaccgaccacgatcaggtcacaacccttttctttggccaggtggtggatttcctggcgcggttggccgtaggtcaggtggcagtcttcctttttcaggtgcgggtacttgagaatcaaacggtccagacgctctttggcctggtcgaattgttgttgctgcaactgggaaaggtccatcggcacgtcaccgccaaaggccatggccatgggctcgacgatgtgcaccagtgacagtacggcaccattggccaatgcagattcctgcgcgcgcttgatcactggatcgcactcttcggtcagatcgacagcgaccagaatatgttggtagggcatgaggcgttcctccagggggactgcaatagattcagtatggctgctttcaagcggatagggttgcgtcagatcaaatccgctcatctgtaaattcgggagtacacatatgacggtctggatagtggtgtcaatccttgtggtggtgctcagccccctggcatggctgcgcccgtcgcgccaccagagcggacgcatggccctgcgcatggaggcgcgccgcatcggcctggccatgcaactggcgccccaggagtggccgccctggctcaagcaggagccgccgagcccttgcgcgcagtactgccggccacggcgcggcagtacgccggcgatctggtgttattggcagttggagccaagtgtgtgggtcaatcagtggcgtgaagtgtgcgtcgatgaaaagttgttgccgcattttgcgacgctgccggacaacgtctacaagatcgaagccgacaagcagatgatcgccctgtattggggcgagaagggcgaggcgagcgtgttgaaggatatcgatgcgctgctcaaggcgttggcctgaattgcaggcaataaaaagcccgacaatcatcatcgggctggagttggccaggcaggccggtaaatctttggttgcggctagcctagccgcatatcccattctgtacagccttttcccacatcttttctattattgatttcgtgaatatttgaatattggcgaggcgcacgtatgagggcggggttctgaactgactggaaagtcgcgtttttcctagcctttggagcgattgacaattgcccggaattggatgaaggtggcgtacccaaatcaaacgggcgtatgaattgagcgtttgtctgtcagacgactcatacagaatcccgactatcgcattggcgggtgtgcctggcggattggcgtgaacattgaagatttcatcaatgtccaacccataggccagcgtccaatgtgtactgttcagcttccatatcgtggagatcagttgatgatttacgaaggtaaagccatcacggttaaggctcttgaaagtggcatcgtcgaactgaaattcgacctcaagggtgagtccgtcaacaagttcaaccgtctaaccctgaatgaattgcgtcaggccgtagacaccatcaaagcagatgcttcggtcaagggcgtgatcgtctccagtggcaaggacgtgttcatcgtcggcgctgacatcaccgaattcgtcgacaacttcaagctgcccgatgccgagctggtggctggcaacctcgaagccaacaagattttcagcgatttcgaagacctcaacttaccgaccgtggctgccatcaacggcatcgcgttgggcggcggcctggaaatgtgcctggcggcggacttccgcgtcatgtcggccaccgccaagatcggcctgcctgaagtcaagctgggcatctatccaggttttggcggcaccgtgcgtttgccgcgcctgatcggtgccgacaacgccatcgagtggattgccgccggcaaggaaaacaaagccgaagacgccctgaaagtcggtgccgtcgacgctgtagttgccccggacaaactggccgaagccgcactgaacctgatcaagggcgccatcagtggcgaatttgactacaaggccaagcgtcagccgaagctggaaaaactcaagctcaacgccatcgaacaaatgatgtcgttcgaaaccgccaaaggtttcgtggctggccaggccggcccgaactacccggcgccggttgaagcgatcaagaccatccagaaagccgcgaacttcggtcgcgacaaagctctggaagtggaagcggctggcttcgtcaaactggcgaaaacctccgctgcgcagagcctgatcggcctgttcctgaacgatcaggagctgaagaaaaaggccaaggcctatgacgaaatcgcccgcgacgtgaaacaggctgccgtactgggcgccggtatcatgggcggcggtatcgcctatcagtcggcgtccaaaggcacgccgatcttgatgaaagacatcaacgagcacggcatcgagcagggtctggccgaagccgcgaaactgctggtgggccgcgttgataaaggccgtatgaccgcagcgaaaatggctgaagtgcttaacggcattcgtcctacgctgtcctacggcgatttcggccatgtcgacctggtggtcgaagcggtggtcgagaacccgaaggtcaagcaagcggtcttggctgaagtggaagcccaggtcaaagacgacactatcctggcgtccaacacctcgaccatttccatctcgctgctggccaaggccctcaagcgtccggaaaacttcgtcggcatgcacttcttcaacccggtgcacatgatgccgctggtggaagtcatccgtggcgagaagtccagcgagctggcggttgccaccaccgttgcctacgccaagaaaatgggcaagaacccgatcgtggtcaatgactgcccgggcttcctggtcaaccgcgtgctgttcccgtacttcggcggtttcgccaagttggtcagcgcgggtgtggactttgtgcgcatcgacaaggtcatggaaaaattcggctggccgatgggcccggcgtatctgatggacgtggtcggcatcgacacgggtcaccatggtcgcgacgtaatggctgaaggcttcccggaccgcatgaaagacgaccgccgctcggcgatcgacgcgctgtacgaggccaagcgcctgggccagaagaacggcaagggcttctacgcctacgaggcggacaagaagggcaagcagaagaaagtcgccgacccgtcggtgcacgaagtgctggctccggtcatctacgagcagcgtgaggtgtccgacgaggacatcatcaactggatgatgatcgccctgtgcctggaaaccgtgcgctgcctggaagacggcatcgttgaaaccgccgccgaagccgatatgggcctggtgtacggtattggtttccctccattccgtggtggtgcactgcgttacatcgattcgatcggtgtggctgagttcgttgccctggctgacaaatacgctgatctgggcccgctgtaccacccgaccgcgaagctgcgtgaaatggccaagaacggccagagcttcttcggttaagcgcccagacgactagagcgagaatatttatgagcttgaatccaagagacgtggtgattgtcgacttcggtcgcacaccgatgggccgctccaagggcggcatgcaccgcaacacccgtgccgaagacatgtcggcgcacctgatcagcaagctgctggaacgcaacgtcaaggtcgacccgaacgaagtcgaggacgtgatctggggttgcgtcaaccagaccctggaacagggctggaacatcgcgcgcatggcctccttgatgacccagatcccgcacaccgctgccggccagaccgtcagccgcctgtgcggttcgtcgatgagcgcgctgcacaccgccgcccaggcgatcatgaccggtaacggtgatgtgttcgtggtcggtggcgtggagcacatgggccacgtcagcatgatgcacggcgtcgaccctaacccgcacatgtcgctgtacgcggcaaaagcctcgggcatgatgggcctgaccgcggaaatgctcggcaaaatgcacggcattacccgtgaagcccaggacgcgttcggcctgcgttcccaccagttggctcacaaggcgaccgtggaaggcaagttcaaggatgaaatcatcccgatgaacggctacgacgagaacggtttcctgaaactgttcgactacgacgaaaccattcgtccggacaccaccctggaaagcctggcggcgctcaagcctgctttcaatccaaagggcggcaccgtgacagccggtacgtcgtcgcaaatcaccgacggtgcctcgtgcatgatcgtgatgtcggcgcagcgtgcccaggacctgggtatccagccgctggccgtgattcgttcgatggcagtggcgggtgtggacccggcgatcatgggctatggtccagtaccggccacacaaaaagccttgaagcgcgcgggcttgaccatcaacgacatcgacttcttcgagctcaacgaagctttcgccgcacaggccctgccggtgctgaaagatttgaaagtactcgacaagatgaatgagaaggttaacctgcacggcggcgcgattgccctgggccacccattcggttgctccggtgcgcggatttctggcactttgcttaacgtgatgaagcaaaatggcggcaaccttggggttgcaaccatgtgcattggtctcggccaaggcatttccaccgtcttcgaacgcgtttaagcgttgggttgacggaagccggggcccagtgccccggtttttgttttttggaatttttaatattttttttcaacaaattttgtaagagggccagagcatgaaagtcgaaccagggctctaccagcattataaaggtccgcagtaccgtgttttcagtgtggcgcggcactccgagaccgaagaagaagtggtgttctaccaagctctgtatggcgattacggcttttgggtacgcccgttgagcatgtttctggagactgtcgaagttgacggcgagcaggtcccgcgctttgctttggtccaggccgaacccagtcttttttcagggcaataacggcaggtcgcgcagactgctgcgcttgacctcaccttgttgccactatatatagcgttgccgcgacaggcgccaactgcctttcacttctcgaattcaggaattttccgatccatgggcaaatcgctggtcattgtggaatccccggctaaggccaagaccatcaacaagtacttgggcaacgagtacgtggtgaagtcgagtatcggccatatccgagacctgcccaccagcggttcggctagcgccagcaaggagccagccgccaagcgcggcaaggcggctgcgggcgaaggtccggtgctcacccctaaagagaaagcgcgcaagcagctggtctcgcgtatgggggtggacccggatcatggctggaaggccaagtatgaaatccttcccggcaaggaaaaggtcatcgaggagctgcgccggctcgccaaagatgctgacaccatctatctcgcaacggacttggaccgcgaaggggaagccattgcctggcacctgcgagaagccatcggcggtgatgacagccgctacaagcgcgtggtgttcaacgaaatcaccaagaaagccatccaggaagccttctccaagccaggcgaactggacatcgaccgcgtcaacgcccagcaggcgcgtcgcttcctcgaccgcgtggtgggttacatggtatcgccgctgctgtgggcgaagatcgcccgtggtctgtcggccggccgagtgcaatcggttgcggtgaagctggtggtggagcgcgagcgcgagatccgtgcgtttatccctgaagagtactgggaagtccacgctgacctcggcaccgccaagggcgccaatgtgcgctttgaagtggcccgtgagaaaggcgaggccttcaagccgttgaacgaagcccaggccatggccgcgctggaaaagctcaaggcttccagctacagcatcgtcaagcgtgaagacaaaccgaccagcagcaagccgtcggcgccgttcatcacctccaccctgcaacaggccgcgagcaaccgcctgggcttcggtgtgaagaagaccatgatgatggcccagcgcttgtatgaagcgggctacatcacgtatatgcgtaccgactccaccaacctgtcggtggacgcggtcgccatggcgcgtacctatatcgaaagcgaattcggcaagaagtacctgccggagaagccgaacgtctacagcagcaaggaaggcgcacaagaggctcacgaagcgattcgtccttccgacgccaacaccacgcctgccaagctcagtggcatggaacgcgacgctgagcgcctctacgagctgatctggcgccagttcctggcctgccagatgctgccggcgcaatacctgtccactaccgtgagcgtgggcgctggcgacttcgagctgcgtgccaagggccgtatcctcaagtttgatggctacacccgcgtgatgccgcagatcgccaagccgggcgatgatgacgtgctgccggacatggcccagggcgatacgctgaagctgatcaagctcgacccgtcccagcatttcaccaaaccgccggcgcgctactccgaggccagcctggtaaaagagatggaaaaacgtggtatcggtcgtccttcgacctacgcggcgatcatctccaccattcaagaccgtggctacgtggcgctgcacaaccgtcgtttctattcggaaaagatgggcgatatcgtcaccgagcgtctgtccgagagcttctccaacctgatggactacggcttcaccgccggtatggaagagaacctcgatgacgtggcccagggcgagcgcgactggaaaaacgtgctggacgagttctacggcgacttcaagaagaagctcgaggtggccgaaagccctgagagtggcatgcgtgccaaccagccggtgatgaccgatattccgtgccagacctgtggccgcccaatgcagattcgtactgcatccaccggcgtgttcctcggttgttcgggttacagcctgccgccgaaagagcgctgcaaggccaccgtcaacctggtgccgggcgacgaaatcgccgccgatgacgagggcgagtccgagtcgctggtactgcgtggcaagcaccgctgcccgatctgcagcacggcgatggacgcctacctgttggacgagaagcacaagctgcacatctgcggtaacaacccggattgcaacggctacgagatcgaggaaggcacttatcgcatcaagggctacgaaggtccgagcctggagtgtgacaagtgtggcagcgagatgcagctcaagactggccgttttggcaagttcttcggttgcaccaacccgacctgcaagaacacccgcaagctgctgaaaagcggtgatgcggcgccgccgaagatggacccggtgaagatgccggagctcaagtgcgagaaggtcaacgacacctacatcctgcgtgacggggcttcggggttgttcctggctgcgagccagttcccgaaaaaccgtgagacccgtgcaccgctggtgctggagatcgtgccgcacaaggatgagatcgatccgaagtaccacttcctgtgtgaagcaccgaagaaggatccggatggtcgcccggccgttatccgctacagccgcaagaccaaggagcagtatgtgcagtccgaagtggacggcaagccgaccggttggaaagcgttctacgacggtggcaagtggaaggtcgaagacaagcgtcagggcgcttgatccggcggatgcgctgaagatccaatgtgggagggggcttgcccccgatagcagcatatcagtcaacatgtgtatgactgatactccgctatcgggggcaagccccctcccacatttgggtctgtttggttctttaggcccgcataggcagcggtttattgcacttgcagtaggttcggctgatccgtgaaactgttcagccagcatcacgcttattcgttgtggagattgccgtcatggcctacgaactctatacccgtaccaatcagaaaatttacttcgcgggtttgtccctggaagcccttggccgtgccgaggaagggaaggagatgaatgccatcgcgctggtccaggcggggcgtgaagcggcgttgttccacctgtacggcgccttgctgggcctgtgccacgaaatcgccggcttttaccgtctgccccaggccggctcgccccgtgctgaaatgatcatgaatcgcgaagtgctcgattcgatggcgattcctgaattggccgagctggtggaaatggcgcaaagccccgacagttgggttgcacgcctactcaaggcgcatgccgatatgttccaaccgccgcgcattccccatgtgcccaagggggatgtgactcagccgctgattgtggcggttgcggtggaagaggaagaacccaagccgttgagccgcgaagagctggaaggctggcgccaggaattgaaaaaaatggcgttgcgctttcgcgaaggcctcaacgagtgctgatcattctgtaggaattggatagcgaccattcatcaagctgtcaagaaacctgttcagatcctctgcgaggctgggtggatgactgatataatcccggcctttcgtggagaacagacttttatgccgacgtcctttctggaaattgttgagttgcctgacggccgaatcgagctgcgccgggctgaggacgaaggttctctggtcattctggatttttccgaggacgccaaggtgttcctgcagggccaacacgtggaagtggctaaagccatgttgagcgtgggtgtgcagatggcaggtcgcctggcagaaggcgaaccggagaaagaagacgggccgcgggttcttcactgagttctgtggtgaaggagtctggggtggttagacaggcttctgtggtgagctagcttgcttgtagtgagtggacttgttgtggtgagcgggcttgccccgcgcagggctgcgcagcagccctaaatagattgacgcagtacatcaggtattccacggtgcttggttttggggccgcttcgcagcccagcgcggggcaagcccgctcaccacagaagcccgcatgtcacaggacttcggtcgatcagcactagcccaatcgaatattcaaactctgcgcatcacccgtacgagcagcgctgatcaactgctgcttggcgctgacactcagtggattcaaccagctcaccactgtatggctgcggcccaggcgaagtgcttcgcaggtcaactgttgggcactttgcgcgccgcgtggttgcagcagcaggatgcgctcgcgattgaggccggcgtcccgtagccaggcctgggtcaggctggcgggcggggcgatcagtgtcagccagcgggcgtcctgctcttcgctcaactcgcgcaggatgggcgccagcaggctcaggcagctccctgctgcaccgcgcaacgacaattcactgaacgcctcaggctcggcgctccagggcgcttcgatcgtttccttgaggatgggcgcaaggggttgggccatgaaggcctcgaacagcgacagttgtgtgtgttgtggggtgtggacgagctgcatgatgcctcctttagcggcgaatgacgccgacgctcaggccttcgatcaccaggtcctggtctttcaggttcacttcaatcggggcgaactcagggttctcggccaggagccaaaccttactgccttcgcgcttgaagcgtttgacggtgacttcatcgcctatacgggcgacgacgatctggccattacgggcttcgcgggtggtgtggacggccagcaggtcgccgtcgaagatgcccacgtccttcatgctcatgccatggacccgcaacaggtagtcggcgcgagggtggaagaaggtagggttgatgttgcaggactcctcgacgtgctgctgcgccaggatcggcgcaccggcggcgacgcggccgatgatcggcagggtcgattcgtcggccttggcctcgaagccagggatgcgaataccgcgtgaggcaccgggggtcatctcgatcgcgcctttgcgagcgagggccttgaggtgttcctcggcggcgttgggggacttgaaccccagttccagcgcaatctctgctcgtgtcggcgggtagccgttgtcatcgaggcagcgcttgataaaagccagaatctcagcttggcgtggcgtcagttttagcatgttgatcgctctgtctttttatacagtgactgggattatatacagtgaactgcgcttggcaatcatccttttccagccctccgctggacggtcatccctgaggcttcccacaggcccgagatagcgctgcctacagatcaatagagatgtgattaaatagcgatgaaatacatgactgcccggccggaaagcgaactcgcaggcttgacaagacacaccctgaaacgtatgtttcaaacaagtgtttgtcaggcggagtagccatggcccagtcggaaaccgttgaacgcattctcgatgctgccgagcaattgttcgcggaaaaaggatttgctgaaacttcattgcggctgatcaccagcaaggctggcgtcaacctcgctgcagtgaactatcacttcggctcgaaaaaggccctgatccaggcggtgttttcgcgtttcctggggccgttctgcgccagtctcgaccgtgagctcgagcgtcgccagggcaaggctgaccacaagccgacactcgaagagctgctggaaatcctcgttgagcaagcgctggtggttcaaccgcgcagcggcaacgacctgtccatcttcatgcgcctgctcggcctggcgttcagccagagccagggtcacctgcggcgttacctggaagacatgtacgggaaggtatttcgtcgctatatgttgctggtcaacgaggctgccccgcgtattccgcccatcgagctgttctggcgcgtgcacttcatgctcggtgcggcggcgttcagcatgtccgggatcaaggcgctgcgggccattgccgagaccgatttcggcgtcaacacctctattgagcaggtgatgcgcctgatggtgccattcctggctgccggcatgcgtgccgaaaccggtgtgaccgacccgacgatggcggccgcccaattgcgcccgcgcagcaaatccgcgccaacccccgccaaggtttgaccctgccgggtgtgcgcagccgcttgcatccgctaagctagcggcccatgccgaattcagctatttactcgcaacctgttgtgctcactgtgcctggtgggtgcaatgggttgtgcgcgttatataaggaagatttatgactgctgccctgcaaggttcattgatggtcgacgttgccggcacttggctcacggccgaggaccgccatctgctgcgccagcctgaggtgggcggcctgatcatttttgcacgcaacatcgagcacccgcgccaggtgcgcgagttgagtgcggcgattcgtgcagtgcgcccggacctgctactggcggtcgaccaggaaggcggccgcgtacaacgcctgcgtcagggctttgtgcgcctgccggccatgcgtgccttggcggataacccgaatgcggaatacctggccgagcagtgcggctggatcatggccaccgaagtactggccgtgggtctggacctgagcttcgccccagtgctggacctggattaccagcgcagcgctgtggtcggcacccgttccttcgagggcgaaccggagcgcgccgccgtgctggcgggtgcattcatccgtggcatgaacagcgccggtatggccgccaccggtaagcacttccccggtcacggttgggccgaggccgattcccatgtcgccattcccaatgatgagcgtagcctggaacagattcgcgccaatgacttggtgcctttcgcacgcctgagtcagcaactggcggctgtcatgcccgcgcacgtcatctacccgcaagtcgacacccagccagccggcttctcgcgccgctggttgcaagacatcctgcgcggtgagttgcagttcgatggggtgattttcagcgatgacctgtccatggcaggtgcccatgtggtgggcgatgccgccagccgcatcgaagcggcgctgacagctggttgcgacatgggactggtctgcaacgatcgcgcagctgccgaattggcgttgagcgccgcccagcggatgaacgtcaagccttcggcgcgcatcgcacgcatgcgcggccagacggtcgcctcgactgagtacaaacaggatccgcgttggttggcggcgctgactgcgttgcgggatgctcagctgattgagtgaagaccgcgtcgcgcccatcgggggcaagccccctcccacattttgatctgtgaacctggtcaagtgtgggagggggcttgcccccgatggcgatgttaccgtcaacgcttctcttgcttatgcggcaacggcgcaaacagcgcttcgatatcctcgttgcccaattgccaatccccggtcgtacggccatccagcacacctgccgccaggtcggacttttccttttgcaggtgctggattttctcctccaccgtgccgcgggcaatcatcttgtagacaaacaccggcttctcttgaccgatgcgatacgcacggtcagtcgcctggttctccgtcgccgggttccaccaggggtcatagtggatcaccgtgtcggcttcggtcaggttcaagcccacaccaccggccttcaggctgatcaggaaaatctgcagcttgccgctctggaagtccttcaccggcgtgcgccgatcccgcgtctggccggtcaacaaggcgtaggcaacaccgcgctgtttcagctcggcttcgatcaggctcaacatcgaggtgaactgggaaaacagcaggatccgtcgaccttcctcaaataactcctcaagcatttccatcaagctatcgagcttgcctgaactgctgccacgggcgggcagggtggcgtcgttgaccaggcgcaagtcgcagcacacctggcgcaacttcagcagcgcctcaagaatgatgatctggctgcgtgccacgcccttgcgggtgatctcgtcgcgcaccttcttgtccatggccaggcgcatggtttcgtacacgtcgcgctgggcctcgttgaggtcgacccaatggatgatctcggtcttgggcggcagctccgtagccacttgttccttggtgcggcgcagcaggaagggtttgatccggccgttgaggtgctgcagtcgtacgtcgctggcgcgcttttcgatgggtacgcggtagtcgcggttgaagctttttacgtcacccagccagcccggcagcaggaagtggaacaacgaccacagctcacccaggtggttttccagcggcgtaccgctcaggcacaggcgctgccgcgcattcagttcgcgtgccgcctgggccgccttgctggacgggtttttgatgtactgggcttcatcgaggatcagcacatgcaggggcagcgccttgagctgttcgatgtccttgggcagcaaggcgtaggtggtcagcagcaggtcgtagtcctgcaggttcgcaaaatgtttcttgcgagctgcgccgtacagcgccaacaccttgagttgcggcgtgaagtgcgctgcttcatccagccaattggggatcagactggtgggcatcaccaccatacaggggcgatccaggcgcccggcgtttttttcgctgagaatatgcgccagggtctgtaaggtcttgcccagccccatgtcatccgcaagtatcccgcctacatcgagctggcgcagcgactgcatccaactcaagccttccagttggtacggacgcaaggtcgcgttcagcccttcgggcgccacgcaggtgaaatccttgatgtcccgcaggcgttgggcgaagttgcggattttttcgccaccttcccattgcagcggcaggtcttccagcgggttaaggcgaatcgcatcggccttggccaggcgcagcgtggtggcgccggcttcctgtagataaaactcaccgagggtggccagcaccggtttcagtcggccataaggcagcgccacttgtatcgggccgtggccattgggcaggccagggatattcaccaggatcagctcatcatcgcggcgccgcgccagtttctccgggttgaggatctcggtgtgggagcgcatcaggttcagcagaatcggcaacaggctcaggcgctcgccgttgacgatgatccccagctccaggtcgaaccagtcgcgctccggcccttcatcaaccgtggcataccagtcatcgacggcgctcaggtcgaagccgaaatcatcatcgatcagcagctcccagccctcggcccgcaaggtcggcgtggcattgagggtgaaggtcagccaggcactgtcattgaccatctcgaacaactcgccggcgctttccggcagggccttgctctggcgcgtggcgatcttgaaacccagcaggcgcagttgctcgcggtacggctgttccagctcgggatggcgcttgatgcgcaggctctgggtgtcctggcgcacgatgatgtcggcgtttttctgcccgctgacatagttgcccaaataattgaacgacagcgccgcccgatgctggatatagcgctgcatcttgccgttgcgtggttcgaacgcgctgaactcaacactggccatccacaggcgcggcaccggcaccacatcttccatgaccacctgcggcaacaccgcgcggttttccaggactgcctggagcttttccagcagctctgcatcctgggcggcagcggggaaggccagggtttcctggaccttgagcagtaccgccgcgatgtgtttgcagttggtgtgcaccgggcaagtgcagcggctgtccaccagaatcaacgtgcccttggccgattcgcgcagcgaaatggtctgccggtagacgttgccgcctgagccttcgcaactggcgatgatggtgctgtcgccggattcgacgatgcgcacccggttctccagggcataacgccgcccgcgctcaaggctctgctctttaaagcgattggcccacgaaggggccaggggtttggtcagcgacgacgtcaggggcatggcgttggatcagtcctggaggtcgggcggtggtgcgctgggtggcttggcggtcagcgaggtgattttgatcagcaacgccaggtggccgccgtccaggtagttgagctggttgttcttggtgcgcacgtcggtctggctcaggtgttcgctggcgatcacgctgccgttggcatcaaactggttgatccagaagttcgcgtcgatatcagtaaagcgccccagttgcaggttcagcacgccctcgatggggaactgcccgaactgctcctggccgtcggtgatggcgactttgacaggctgctcgcccaggttctgttcccaggccttatgcagcagcaccgtgtaggtggagtcggcgcgcagcttatcgacaatgttggacaggcgcggcgggctcagccgatcgcccaggcgcgcagcgccagcatcccagttttccggagcggcacggctgttgatcaccggttcggcgttctggcgcaccaggatcatttccacctggtacgggctgtcggcgaacgccgcaggtgccacgaccaccaacaacaggctcaacatgcggaacaggcgcattcgggcgtccttcaagcaggtttcgggatgaggcgctcgaacaacgcctccaaggtattaaagcgttcttcggcacgttccatcggcaccatgaacttgaacagcgtagccccttcgaacttgtagcggttgggctggccctggatcagcttgatcagcaccaacgggtccacgggggtctgcgcctcgaattcaatgcgcccaccctgcggcccggcgtcgaccttcttgatccccagttgctcggcctgcaatttgagcagggtcaggcgcaccaggttcttggtcggctccggcaacaggccgaagcggtcgatcatctccacctgcaggtccttgaggccttcttcgtcggtggccgaggcgatgcgcttgtacaggatcagccgtgcgtgcacatccggcaggtagtcctcgggaatcaacgccggcaagcgcaggttgatctccggaccgccgcccaatggttgatcgaggttcggttgctcgcccttgcggatggcttttaccgctcgctcgagcatctccatatacagcgtgaaacccaccgcctggatctgcccgctctggccatcgcccagcagttcgccggcgccacggatttccaggtcgttggtggccagtacaaaaccggcgcccaggtcctgggtgttggcgatcgcttccaggcgtttttccgcatcgccggtgatttgctggcgcggtggtgtcagcagataggcataggcctggtggtgactgcgcccgacgcggccgcgtaattggtgaagctgcgccaggccgaacttgtcggcgcgctcgatgatgatggtgttggcgctcggcacgtcgatgccagtctcgatgatggtcgaggcgatcagcacgttgaagcgcttgtggtagaagtcgctcatcacctgttcgagttcgcgctcgcgcatttgcccatggccgatggcgatacgcgcctccggcaccagctcggccaggtcggcggcgcatttttcgatggtcttcacgtcgttgtgcaggtaatacacctgcccgccgcgcagcagttcgcgcagcagtgcttccttgaccgtgctcttgttctgctccatcacgaaggtgcgcaccgacaaacgacgcgccggcggcgtggcgatgatcgacaggtcgcgcatgcccgacaccgccatgttcagcgtgcgcggaatcggcgtggcggtgagagtgaggatgtcgacttcgctgcgcagggccttgagctgttctttctggcgcacaccaaagcggtgttcttcgtcgatgatcaccaggcccaggttcttgatcttcacatcatccgacagcagcttgtgcgtgccgatcacgatgtcgatcttgccttcggccagatcggcgacggcggcgctcacttccttggccgacttgaagcggctcatcacttcgacagtcaccggccaatcggcaaagcggtcgcggaagctgttgtagtgctgttgggcgagcagggtggtgggcaccaggattgccacttgtttgccgccatgcaccgcaataaaggcggcgcgcatcgccacttcggtcttgccgaagcccacatcgccgcagaccaggcggtccatcggcttgggcgcgagcatgtcggcgcgcactgcttcgatggtggtttgctggtccggggtttcttcgaaggcgaagccggcgctgaaagtggcgtagtcggctttcgggtcggcgaacgcgtaaccctctcgggcggcgcgacgtgcatagatgtcgagcagctcggcggcgacgtcgcgcacctgttcggcggccttgcgcttggctttctgccaggtttcggagcccaggcgatgcaacggcgccagggcgtcgtcgctgccggtgtagcgggcgatcaggtgcaggctggctaccggcacatagagcttggcgccttcggcgtattccatggtgaggaattcggcggcctggttgtcgatctccagagtctgcaggcccaggtaacggccgacgccatggtcgatatgcaccaccggcgcgccttcacgcagctcggtcaggttcttgatcaccgcgtcgttgttggcgtcggcgcgtttttcacggcggcggcgctgcatcacgcgttggccgaacagcgggctttcggcaatcaatgccaacgctggatcgtccagcagcaggccttcgtccagtggtgcgatggtgatcgccaggcggtctttgctcgccacaaaatccggccagctgtcgacggtcttggggcgcagcttcaggcgttcgagcagttccagcagtacttcgcggcggccggcagactcggcggtaaacagcacgcggcctgggaagtcgccgaggaagttggacagcgcatccagcggttgcgtggctttggcctggatcgccaggtcgggcaacgtgcccgcggggaagcgttcgcgaccgacaccggtgtcgacctcctgctggctagcgaccacgcgcggccagtttttcaggcgtgcgaagcagtcttccaccggcaggaacagctcggcgggcggcaataaaggacgggatgggtcgacgcggcgttcttcataacggttacgcacgtcgttccagaagttttccgctgcttgctcgatacctggcagcgagaacacttgggtgtcctggggcaggtaatcaaacagggtggaggtttcgtcgaagaacagcggcaggtagtactcgataccggccggtgtaatcccgctgctcaggtcctggaagatcgggcagcggcggaagtccacgtcgaagcgttcacgaaagcgcgccttgaagcgggtgaccgcgtctttttgcagcgggaattcccgtgccggcagcagcttgatcgagtccactttgtcgatggagcgctggttctcggggtcgaaggtacgcagggtctcgatttcgtcatcgaacaggtcgatgcgatagggcagtttgctgcccatcgggaacaggtcgatcaacgcaccgcgcaccgcgaactcaccgtgctcgtacaccgtgtcgacgcaacggtagccgctggcttccaggcgcgtgcgcatctgttctacatcgagcttctggccgacatccagcaccaggctgctgcccagcaggaacttggtcggcgccaggcgatgcagtgccgttgttatcggcaccaccaacacgccgtgggccagttccggcaggcggtacagactggcgatgcgctgggagatgatgtcctggtgcggcgagaacaggtcgtagggcagggtttcccagtcggggaaatgcagcaccggcaaatcgggggcgaagaagctcagctcctgctccaaccgttcggcgctttggctgtcggcggtgagcagcagggtaaagcgcttggctgcgctggcagcctcggcgatagccaggctcagggcggcaccgggcaggttgccccagtgctgtttacctgcttcggcagggagtagcggtagacgcagaacgggcacggaaggttgagctccaagcgttgcgacaaagtcggtaattgtaacggcccgaggtgccgcctgtcagtttctgactgagcctattacggtttgtaggaaatgtggtggctaagacaaacaatggcgtgttttgactcaatatgtagtgccgaaatacgcgattgtttaggagggttacggacaagtcggccagttctcccaactggtggccttctggaacccgcgtatttactgggctgtagcggggcggtattttttggcaaggggtttttgttgtggggcgcgcattgctccgagggcggtcgggcggcataatgtagccccttttttcagcccctacatgtggaaggttcccgtgactcagaagcccgaccagtgtcttggtgaatggatcgaccgtgaagcactcgcagaagcgatgatcccgcttatcggtcagctgtaccgcaataacaatgtggtgagctcgatctatggccgcagcctgatcaaccagtccgtcatcgcgattctcaaagcgcaccgctttgcacgccatcgctctgccgacgacagcgaactctccgtccacgaaacattcccactgcttaaagccatgagcgagctcaagctcggcgcggcctcggtagacctgggcaagctggcctacaaattccgcaaggaaggcgccggccgtaccgccgagcagttcgtgcgtgaagaaatggccgatgtggttggccagcaaaacgccgcggcccgcaaaggcaccgacgtggtgctgtacggcttcggtcgcatcggccgcctgctggcgcgcatcctgatcgaaaaaaccggtggcggcgacggcctgcgcctgcgggccatcgtggtgcgcaaaggcgccgagaacgacctgaccaagcgtgccagcctgctgcgtcgcgattcggtacacggtccgttcaacggcaccatcgtcatcgacgaagaaaacaacaccatcaccgccaacggtaacctgatacaggtgatctacgcgaagaacccgtccgaggtggattacacccagtacggcatcaaggacgccctgctggtggacaacaccggtgtatggcgtgacgccgagggcctgggccagcacctggcctgcccgggcatcgaccgcgttgtgttgaccgcgcctggcaagggcaagctgaagaacatagttcacggcatcaaccacgctgaaatcaccgctgacgacaagatcgtgtccgccgcgtcctgcaccaccaacgccatcgtgccggtgctgaaggcggtgaatgacaagttcggcatcgtcaacggccacgttgaaaccgttcactcgtacaccaacgaccagaacctgatcgacaacttccacaagggcgatcgccgtggccgtagcgccgcgttgaacatggtgatcaccgagactggtgcggccaccgctgcagccaaggcattgcctgagctggccggcaagctgaccggtaacgcgatccgcgtgccgacgccaaacgtgtcgatggccatcctcaacctgaaccttgagaaagccgccacccgtgaagagatgaacgagtacctgcgctacatggcgttgcactcggatctgcacaagcagatcgacttcgtcaactcgcaggaagtggtctccaccgacttcgtgggctcgcgccacgccggtgtggtggacgccgaggcgaccattacccaggacaaccgcgttgtcctgtacgtgtggtacgacaacgagttcggctacagctgccaggtggttcgcgtgatggaagacatggctggggtcaacccgccagcgtttccgcgctaagcacccgcgttgaataaaaaagccccgactggttcggggtttttttgtgcctggggattttgtgctggctggaagggcctcatcgggggcaagccccctcccacatttaaactgcattcctgcagggttaatgcggtccagtgtgggagggggcttgccctcgatggcgtcagttcagacaatacatgtctttattccagcaacctctccgacaagcccttgggcgctaaccagatccccaggtaagccctcgccagctcatcgtcgttgctgctgaacagcacttccccattgatctccaggttcaagccgcgtccgggtcgaaaatccagtgcgtagcgatcaccgctatgaatgttgcgaaagacggcatgcagtttgtccacttcgggtttcaagcggtcgctgacgtgctggcgctccagcgtggtattggcggccttgatcacatcattgcgatcaatatcgcgaaagtaatacagctccaggcgcagcgtcttttgctgtttccaggctgactctgcgggagtgtcggctggggcatacagcgccgcggcgtatacatcggcccaaagataggtcagtactgcctggtttttcagtgccaattcatgagactgcggggggaaacctgcctgcttgagtcgggcgacttcattggcttgcaccgtgaacgaaaacatcagtaataaacagaaagcgacatgccgcataatggctcgtcctgcaaaggtgcgtgccgacagtgtaattgcaatttcctgagcgtgtagtagaggcaatactggcctacgacgcgaccaagggttaatgtgcgcggcgttgagccttatatagactgtgccccggttcacacacttgagccaaattgtccttcatgaccgctggcgcggcatgatttagcccggcgtccaaccgtacgcctggcctgttctgaggagtacgcatggctgtctacaactacgacgtggtggtactgggttccggcccggctggagaaggtgcggcgatgaacgctgccaaagctgggcgcaaggtggcgatggtcgatagccgtcgccaggtcggcggtaactgcacccacctgggtaccatcccgtccaaggcgttgcgtcactccgtgcgccagatcatgcaattcaacaccaacccgatgttccgggccattggtgagccacgctggttctcgttcccggacgtgctcaaaagcgccgagaaagtcatctccaagcaagtcgcctcgcgcaccggctactacgcccgtaaccgcgtcgacctgttcttcggcaccggcagctttgccgacgagcaaaccatcgaagtggtctgccccaacggcgtggtcgagaagctggtggccaagcacattatcatcgccaccggttcgcgcccgtatcgcccggcggacatcgatttccaccacccgcgcatctacgatagcgacaccatcctgagcctgggccacaccccgcgcaaactgatcatctacggcgccggcgtgatcggctgtgaatacgcatcgatcttcagcggcctgggcgtactggtggaactggtggacaaccgcgaccagttgctgagcttcctcgactcggaaatctcccaggcgttgagctaccacttcagcaacaacaacatcacggtgcgccacaacgaagagtacgagcgcgtcgaaggcctggacaacggcgtgatcctgcacctcaagtccggcaagaagatcaaggccgacgccttgctgtggtgcaacggccgtaccggcaacaccgacaagctgggcatggaaaacatcggggtcaaggtcaacagccgtggccagatcgaggtggacgagaactaccgcacctgcgtgccgaacatctacggcgccggtgacgtgatcggctggccaagcctggccagtgctgcgcatgaccagggccgttcggccgctggcagcatcgtcgacaatggcagctggcgttatgtgaacgacgtgccgaccgggatctacacgattcccgagatcagctcgatcggcaagaacgagcacgaactgaccaaggccaaggtgccttacgaagtgggcaaggcgttcttcaagagcatggcgcgtgcgcagatcgccggtgagccccaaggcatgctgaagatcctgttccaccgcgaaaccctggaagtcctcggcgtgcattgcttcggctatcaggcgtcggagatcgtgcacatcggccaggcgatcatgaaccagccgggcgagctcaataccctcaagtacttcgtcaacaccacgttcaactacccgaccatggccgaagcctatcgggtagcggcctacgacggcctcaaccggcttttttgagcggctccggccggtggcctgagccggccggggagaccgatttcagtaattcccgagggtggcagtggccaaaccgggaaagtctgtaatcaggctatctacgccgaagtcggcgagcctgcgcatcagcgcgggttcgttgactgtccacacggacacgtgcaagccctggcgctgggctttttccagtcgctcgggggtgcacagcgtccagttcaacgccagaatctcacagccatagttctgcgcgaccttcaacgggtcgagccaggcatattcggcaaccaggccgcgtgacaggtccggggtgagttcaaccgctgctttcagcacttcccgcgaacttgaggtgacggtgactttgtccatcaggccaaagcgcacggccatttcacgaatggccagcaccgtggtggcggcgcgggtgcgtgaggcgcttttgacttccagttgccagtgatcgaagtcgcattgttcgaacagttcttccaggcgtgggatcgggcacggcttgacccagcccgggccgcctttgcgcgcgtccatcttcaccaggtcggctgccgaatactccacgaccttgccgcgccggtcggcggtgcgcttgagggtcgggtcgtggatgaccatcaactcgccatccatggacaggtgcaagtccagttcgcagcggcgtaccccgtgcttgaggcattcctggaagctggtcagggtgttttccggtgcttcgcctttggcaccgcggtggccgtaaatcagggtcacagttgctcctatgcgccaggtctgctggcggggtaatacgaattcaggtgtcttgggcgtcgctctgttcccgcgccaggcgccgttcctgggcctgtttctgcaggatgtaacgcgccagcagctggcgttgggcgtcagtcatggcttcgaattccgtgccgacgtcaaaacctgtgcccttgggatcgcaatgggtgacccgggcgcgcagcagcaggccaagcgcctggggcatcagcaccagcttgaccgccaggtgcgcaccgggcgacaggggcgtggggttttggaagtcgataccgccctcggaaaggatcaccggctgcggtgcgccaacttcatccagcaggccgcgcgccatgatctggctgagcaggtccaggcgtttgttctgtactttgaggaaggcggccaggctgcgatctttctcatttatctggcgcaacaggtgctgggcctcgaattcactcaggtgcagttcactgagcagattgaatagcggcgaatcatccagcaacacttccttgctcgccgcttcgggagcagacaggcttttgatttggagtgcgatcatgtcgtcgatacggtagtattcgcggcgttcttcttcatctaatgtcgacatggcgaaccccaagtagcgttaatggtctgagtgtaaagctgcttaccagaccccgccaccgggacgtcttcttttcctccgaacaagccccgacatgttcagacctctcttcgtatttatcggcacgcgttatacccgtgcaaagcgtcgcaatcattttgtgtcgttcatttccctgacctcgatgatcgggctcgccttgggcgtggtcgtgatgatcgtggtgctgtcggtgatgaatggcttcgatcatgagatgcgcacccgcgtgctgggcatggtgccccacgcgaccatcgagggcgatgcgcccatcagcgactggcaaagcctggcggccaaggtcaagcagaaccccaaggtattggccgttgcgccatttacccagatgcaggggttgctgaccaacgacggcaaggtgcagaagatcctgctcaatggcatcgacccggcccaggaacgtaacgtgtcgatcatcgacaagttcatgttgtcgggcaaactcgatgacctggcgcccggcgagttcggcatcgtgatcggcgacaaggcggcggccaagctcggcgtgagcctgggcgacaagctgaccttcgtcgcgccggaagtcaccgtgaccccggccggcatgttcccgcgcatgaagcgctttaccgtggtcggcaccttccacgtcggcgccggcgagatcgacggctacctcggcctgaccaacctcaccgacctggcgcgcctgcaccgctggcagccggaacaggtgcagggcctgcgcctgaagttcaacgacctgttcgacgcgccgcgcacttcatgggaaatcgcccagcatttgggtgacagccagtactacgcccgcgactggacgcgaacccacggcaacctctaccaggccatccgcatggaaaaagccatgatcggcctgctgttgctgctgatcgtcgccgtggccgccttcaacatcatctccacgctggtgatggtggtgaacgacaagaagggtgatatcgccatcctgcgcaccctcggcgccacaccggggcagatcatggtgatcttcatggtgcagggcaccgtgatcggcgtggtcggcaccttgatcggcacggcggtcggcatcctggcggcgctgaacgtgagtgccgccatcgctggcctcgaaaccctgatcggccacaagtttctcaacgccgacgtctacttcattgactacttgccgtcccaggtgcaggcccaggacgtgttgatggtgggcggcgctgcgttggtcctgagtttccttgccaccctgtatccagcctggcgcgcggcacgtacccagccagcacaggccttacgttatgagtgaatcgggcatgagtgaaaaagcaatcctgagctgccgcaacctgggcaaatcctacgaggaaggcccggagtcggtggtcgtgctgtccaacctgcaacttgagctgcacccgggcgagcgcgtggcgatcgtcggcagttccggttccggtaaaagtaccttgctgaacctgctgggcggcctggatacgccgtcccagggcagcgtgtggctggccggtgaagaactgtcggccctcggtgagaaggcccgtggtcagctgcgcaaccgttcgctcggttttgtgtaccagttccatcacctgttgccggagttcaccgccctggaaaacgtgtgcatgccgctgctgatcggcaagaccgcgatcccggaggcccgccagcgcgccaaggccctgctggagcgcgtcggcctcggtcatcgcctggagcacaaaccggccgaactgtccggcggcgagcgccagcgtgtggcaatcgcccgtgccctggtgaacaacccgggcctggtgatgctcgacgagcctaccggcaaccttgactcccacacggcccagggcatcaaggacttgatgctggaactgagcacccagatgcgcaccgcgttcctggtggtgacccatgacatgagcatggcccgtcagatggaccgcgtgctgcacctgcaggaaggtcatctggtcgccatctgacccgtttcaagcccggtgcttcatgcgccgggctttttcattttttcaggcggtgcaagcgaatgttcagaccgttatcgattttcatcggcacgcgctatacccgcgccaagcgccgcaaccgttttgtctcgtttatctcgatgacctcgatgatcggccttgccctgggtgtgctggcgatgatcgtagtgttgtcggtgatgaacggcttccagcgcgaaatgagctcgcgcatccttggcatggtgccccacgccaccatcgttggtgtgaacccgattgataattggcagcccgtggccgccgctgcgatgaagaatccggaagtcaccgcagcggtaccgttcacacaaatggacggcatgttctcctacaaaggcgcgatgcagccgatcgagatcagcggcatcgacccggcacaggaaggcaaggtgtcgatcgtggcccagcatatcgtgcagggcaaactggatgacctcaaacccggcgaattcggtgtagtggtcggcgaaatcaccgcccggcgttttcgcctgaatgtgggcgacaagctgaccctgatcgtgccggaaatcagcaccgcgccgggtggcatcaccccgcgcatgcagcgcttgaacgtggtggggatcttcaaggtcggtgccgagctggatggctccatggccatgatccatatggccgacgctgccgagatccagcattggcagccgaaccaggtgcaaagcgtgcgcctggcggtgaaagacctgtacgcggcacccaaggtctcggcagacatcgccgccagcctgggcaccgcctacaagcccgatgactggacccacacccagggcagtctgttcagcgcgatgaagatggaaaagaccatgatcggtctgctgttgctgatgatcgtcgccgtggcggcgttcaacatcatcgccaccttgatcatggtggtgaacgacaagggcgcggacattgcgattttgcgcaccattggcgccacgccacggcagatcatggcgatctttatggtgcagggcacggtgatcggcatcgtcggcaccttgatcggcggcgtattgggcgtgatcgcggcgctgaacgtgagtgaactggtgggttggatggagcgggtcaccgggcagcatatcttcagttcggacgtgtattttgtcagtaacctgccttcgcagctgcaaggtggggatgtggtgctgatttgcacggctgggtttgtgctgagctttttggccacgctgtacccggcgtatcgggcggcgaagattgagccggcgcatgcgctgagatattcgtaatattcaagaccgctatcgggggcaagccccctcccacatttcgaatgtattcacaaatcaccctgtgggagggggcttgcccccaatagggccggtacagcttgcatcaatctccagcaggcaactcaatcacaaaccgcgtccaccccgtcccggattcacaataaatcctccctccatgcgcccgcacaatcgactgggtaatcgccagccccaaccctgcatgctcgctgctgccttcgtgccgtgccggatcggcccgatagaagcggtcaaacaaccggggcagcaactcggttggaatgccgtccccggtgttctctactgaaagtttcaccccatcctcgatttgcacacgcacttcgccgcctggcggggtaaagcgcagcgcgttatccagcagattcgacagcgcccgccgcaacattccacggtcgcccatcgtatgggccgtgccctcgcgaaccaggctgatctgcccgtcctccgccagcagcgtgaaaaactccagtaacgcatccacttcatcggccagtgccaaaggctcgcgcttgggcatcagtaggccatgatcggccttggccaggtaaagcatgtcattgaccagttgcgccatccattgcagctcttccaggttgctgtgcagcgcctcgcggtaatcctccagcgggcgtggctgggtgaggatgacctgggtctgagtcagcaggttcgacagcggtgtgcgcagttcgtgggcgatgtcggcggagaacgccgagaggcgctggaacgcatcgtccaggcggccgagcatggcgttgaaggcctgggccagttcggccagttccaccggcatatgttgctggggcaggcgctgggtcagggagtgggccgacacactggcggccacttcgcccatgcgtcgcaatggccgcaacccgctgcgggcagcccaggcgccgagcagggcggtggccagggctgacaagccgacggtgagccagatcagatgctgcatgcgctgcaggaaatgctggtggtgggtgatatcaagcatcagcgtcagttgtggcgagtcgggttggcccgccctcagcggcgcgttgtagacccggtagtcggtgtcggcattttgcaggctgtgcaggccgggggctgcgggcaagtcgacgctgggggcatcgtccagccagcgttggccggcggcggtgatacgcagggtaaggtcgggctggcgcctgagttcggcgcgcagttgcgcctcacgctgggccagggcttccggtgaatcgaccccctgcaaggtactgcgcagcgccaccagcttgctgtcgagctgttgctggtccagctcgatgaagtgcgcttcgctggcgcggttgaacagcacaccggcgatcagcgacaccaccgccgtgcaggcggcaaacagcaacgccaggcggctggccagggacaggcgcttgatcaattgacccgttcctccagcacatagcccatgccgcgcacggtgtggatcagtttgttggggaagttatcgtcgactttcaggcgcaggcggcggatggcgacttcgatgatgttggtgtcgctgtcgaagttcatgtcccatacctgggaggcgatcagtgatttgggcagcacttcgccctggcgccgcagcaacagttccagcagggagaactccttggcggtcaggtcgatgcgctggccgtcccgctcgacgcggcggcggatcaggtccaggcgcaggtcggccagttgcagcgcagtttcctggggcgtgctgccgccccggcgcaataggctgcgcacgcgggccagcagctcggaaaaggcgaacggcttgaccagatagtcgtcggcgcccagttccaggccgtgcacgcggtcttccacggcatcgcgggcggtgaggaacagtacgggaatgtccaggccggcgctgcgcacggcttggaggatctgccagccatcacggcccggcagcatcacatcgaggatcagcaggtcgtagtcgccggtcaatgccaggtgctggccgctggtgccgtcggccaccagttcggtggtaaaccccgcctcggccaggccctggcgcaggtagtggccggttttgggttggtcttcgacgatcagcagtttcatgggcggctcttggcaacggtggacgacggctttataccttgggtgccagggcaggagggcaacctgacaaagttgtaatctagcagtcagctggctggcagcggcgcattcttagagtgctccccaggcgagtcacacatttttggagaaaaccgatggcgttgcgtacacccttgttgttggccggttgcctgttggcgttgagtgttgaggcgatggccgatggcgctcatacctatgcgttcggcgaggcggcgccggcgagcaaagccacgcgtactgtggaagtgaccctgcaggacatttccttttcgcccaagtccctggatgtcaaagccggtgagacggtgcgctttgtactggtcaacaaagggcagttgctccacgaattcaacctgggcgacgcggcgatgcatgccgagcaccagaaggaaatgctacagatgcaggccagcggcatgctcacctctaccggcatgggcaatatggaccacaacgccatgggccatggtgcgatgaaacacgacgatcccaatagcgtattggtcgagccgggtaaaactgcggagctgacctggacgttcaccaaggccacaggcctggagtttgcctgcaacctgccggggcattaccaggcgggcatggtcggcaagctcaacgtcgattgatccgctggcgcttaggcgcgggggcaaaggctggtagactggcgtggtttatttagccaggtttccgccatgcatcccgcagccgaacattcgccgctgggcaagtccagtgaatacatctccacctacaccccgtctttgctgttcccgatcccgcgtgccgccaaatgggccgagctgggcctgagcgccgagaccctgccgtacaagggcgtggatttctggaactgcttcgaattgtcctggctgctgccgtcgggcaagccggtggtggccatcggcgaattcagcatcccggccgactcgccgaacatcatcgagtcaaagtcgttcaagctgtacctcaactcgctgaaccagaccgcgtttgccgatgcggccagcctggaagccaccctgcgcaccgacctcagcgccgctgccggtaaaccggtgagcgtacgcatccgcagcctggccgagatcgaggccgagggcgtgatggccttgcccggtgtgtgcatcgatgacctggatatccgcgtcagcaactacgaacacccgcgcccggaactgctgcgttgcgatgattcgcgcgttgtcgaagaaagcgtgcacagccacctgctcaaatccaactgcccggtcaccagccagcccgactggggcagcgtggtggtggagtaccgtggtcacgcgttggaccacgccagcctgctcgagtacatcgtgagctttcgccagcactctgacttccatgagcaatgcgtggagcgcatcttcctggacttgcagcgcctgctgaagccggaaaaattgacggtgtatgcgcgctatgtgcgacggggtgggttggatatcaacccgtatcgcagtactgaggatgtggcgttccagaacgttcgcctggcccgtcagtaggcttattgcaagataaatgtgggagggtgcttgcccctcccacatgtcgggcagattagatccccatgctgcccagcgtattcatgatattgcgcaaggtgccggaaatcaccgggtgctcggcgtcgaactcgatggccgcttgattcacatcgtcggaaatgctgggtgtctgggtggccggttccagttcaagttgcaattcaaacttggcaatcaaggcttccagcgctgtgcgcttttcttccgacagcggcggttcctgttccaactgcccgcgcaggatctcgacctgttcttccagttttttgcgatcaggcatgacgtgtttccttttatcgataggcactggcatagaccacggcacgccgcgaaaggtctacgggctgacctgtagattaatccaccggcgccctcagtgcatgatctctatcagggcttctcgcctttgaggcgccgtaagctgatatctgccaggcaggtgcccaattcaccgaggtgatcgatcaccgagtgcacacccaacccatacaacgccacggtggccttgccacgtttgtgctcgcgttgctgctcggtcagtgcttgccactgctcgggggccagcccgcacagcgagccgcacgaagccaggccgatggtccacaagccggcattcaggcctgactgcaacagacgcggctcgccgctgaccaatacacagccttccaggcgttcgatgttcaattccatcagggcttgccagcacgcgtgcggggcgggccagcgaatggaggagggtgatgtcgccttgacccagttgggtagcgtggcggccagcggtgtggtgacagcgggggggagttcatccagccaggcgcagggcacgccttgttccttgaggctgcgcaggattttcagcgcgccggtagtggcttgggagtcgggtgcgggggaatcggtgcgtgccctggaaccgaaatccaccaagcagccactcaggccaaacagaacggcagtcaaggcgggggtgctggcgatggctatctcggcgtgaggcatgtcgacatccctgaaatagcgctaacgctatccaggcaccatgacaggccgatgacagccgggataattgtaggaattttgtccatttttggtctgacgtttcctagttactgcctaattggcgacttccgtcatatactgacgtccttattcagggcatagcgcccatgacagaccattcaaggagcaaaagctatgcgctggagccactacttcgctcagctgtcagtgtgtgccactgtcctgctggcgccgttcgccgcacaggcagcatcggaagacgatccatgggaaagcgtcaaccgtccgatcttcactttcaacgacaccgttgacacttacgcgctcaagccattggcccagggttaccagttcgtgactccgcaattcgtccaggatggcgttcacaacttcttccgcaacatcggcgatgtcggcaacctggccaacaacgtgctgcagctcaagccccaaaaggccggtgtagatacggcccgtttgctggtcaacaccaccttcggcgtgttgggcttcatcgatgtaggcaccaaaatggggctgcaacgcagtgatgaagacttcggccagaccctcggttactggggtgtcggcagcggcccttacgtaatgctgccgctgctgggcccgagcaccttgcgtgacgcgccgtccaagtacgtggacagctacacccagccttaccgctacatgaacgatatcggctggcgcaacagcaccttcggcctgaatatcgttgatacccgtgccagcctgctcgacagcgagaagctgatcaccggtgacaagtacacctttattcgtaatgcgtacctgcagaaccgcgagttcaaggtcaaggacggcaaggtcgtcgacgacttttaagccgtgatgttttgaaatgaaaaaggcgacccatgtggtcgccttttttgtgcgcggttttcagcgcattttcaggatcctgagacccaggtgctggtcttcgccggtggttttggtccacaccacctcggtgtccgcctccaggcccttcagcgcggcgtgctccgagtcgatgcgtacggtcaacaggtcgcccgtgttgaactggcgcggcgcctgcacctgcatgccagagctggaaaggtccacgcaaaccccggcaatctcttgccctgcatggatcagagacacatcggcatccacacgcatgcggatgaaatcgcgtttttcggcgtagtcgcgctcgtgttcgctcatgggctccatccttactttgtgttgtggtcgtgcctgttcttataactcccggtgatttgcggtgtaaagacgcccggcgaccatcggcatgagcttgaaacccctgacggatgggagtaccgtctgcgccttagaagggcacctctgctttacctttgtgcatgggaaaaatcccaatgctttgtaggacagagaggctagaaagcgaatccagtacgtgagcccggccattgtcgcgccacctacgccaacctaattctggcgccgtttgcccacatgcaaaaaaccagtgccacgctgctgataatcgatgacgacgaagtagtgcgcgcgagcctcgcggcctatttggaagacagtgggttcagcgtcctgcaggccagcaatggccaacagggtctccaggtgttcgagcgcgaccagcccgacctcgtgatctgcgacttgcgcatgcctcagatgggcggcctggagctgattcgacaggtgaccgagctcgccccgcagacgccagtgattgtcgtatccggcgccggcgtgatgaacgatgccgtcgaggcgttgcgcctgggcgctgccgattacctgatcaagcccctggaagacctggccgtgctggagcactcggtgcgccgtgcgctggaccgggctcgcctgctgctggaaaaccagcgctaccgcgaaaagctcgaaaccgccaaccgcgaacttgaagccagcctcaacctgctccaggaagaccagaatgccggtcgccaggtacagatgaacatgctgccggtcagcccgtggaccatcgacgaattccagttcgcccaccagatcatcccgtcgctgtacctgtcgggtgatttcgtcgactattttcgcgtcgacgagcggcgtgttgcattctatctggccgatgtgtccggccacggtgcttcctcggcttttgtcaccgtgttgttgaagttcatgaccacacggttgctgttcgaatccaagcgcaatggcaccttgcccgagttcaccccctccgaggtgctgggccacatcaaccggggcctgatcagctgcaagctgggcaagcacgtgacgatggtcggcggcgtgatcgatgaagaaaccggtcttttgacctacagtatcggcggtcacctgccgatgcctgttttatacactcctgacagtgtgcgttacctggaagggcgtggtctgccggtgggcttgttcaatgaagccacctacgaagaccacatcctggaactgccgccgaccttcagcctgacgctgatgtccgacggcattctggacctgcttccagagcctacactcaaagagaaagaagccgccttgccccaaaaggtcaagtcggcgggcggcagcctggatggcctgcggcaggtttttggattggccacgctaggggagatgccggatgatatcgccctattggtgttgagcaggaatctttgatgagtaccggaagaatccaattcgccgagcaagacgggaccttcgtcctgaagtttgtcggtgaagtgcgcctgaccttgtgttcggcgctggatgcgacgattgagcggatcttcacagcgctgaacttctcggcgatcgtgatcgatctgaccgaaacccgcagcatcgatagcaccaccttgggcctgttggccaagttgtccattctgtctcggcagaaggtcggcctgttgccgaccgtcgtcaccacccacgaagacatcacccgcctgttgcagtccatgggctttgatcaggtgttcaacatcgttgaccgcccaatcccatgcccggaatgcctgaccgacctgccgtcccaggaccagtccgaggaagtcgtgcgggtcaaggtgctggaagcgcacaagatcctgatgggcttgaacgattccaaccgcgaagcctttcacgacctcgtcaacgccctcgagcgccactgaccgcattccaactgtgggagggggcttgcccccgattgctgagggtcaatcacaacatctgtgcctgacacactgctatcgggggcaagccccctcccacattgaatctagataggcttcagatctactgagcgtaaaaaagggcggcacccgcgagggtgccgccctttttgtcgccgtctgccttacaacttggcagtcagcaacgcctccagcttctcctggtcccgagcaaactgacgaatcccctccgccagcttctcagtcgccatcgcatcctcgttggactcccaacggaactgcgcttcagtcagatgcacgcgcgcttcaccggcatgcccaggcgataacttgcgctccagcttgccttcatccgccgccagcttctccagcaggtccgggctgatggtcaggcgatcacagcctgccagctcttcgatctggctcaggttacggaagctcgcacccatcaccacggtcttgtagccgttggccttgtagtagttgtagatgcgggtcaccgactgcacgcccggatcttcggcaccggtgtagtcgttgccgttggccttcttgtaccaatcatagatacggcccacgaacggcgaaatcaggaacaccccggcttcggcacaggctacggcctgggcgaaggagaacagcagcgtcaggttggtctggatgccttctttttccagcttctccgccgcgcggatgccttcccaggtggaggcgatcttgatcagcacacggtcacggccaacgccggccttctcgtacaggtcgatcaggcgatgcgcacgcttgagaatggcggcttcatcgaacgacagacgggcgtccacctcagtggaaatacgacccggcaccactttgagaatctcttgacccaccgccaccgcaaaacggtcgctggccaggcccacatcgccattgcagtcctgtacggcttcatccagcagcttggcataagccgggatcgacgccgccttgagcagcagggaagggttggtggtggcatcctgcggcttgagcttggcgagggtggaaaaatcgccggtatcggctacaacagtggtgaattgcttgagttgttccagcttggaagtcatgggcgtgctctgtcctgtgggtctgatgacattacccgagcaccggcaggcgctcaagggcgcaaatgcgttcgatcgtttgcgagggcaacaacctgaaaacggccgtttgaatgccttgtcttggtgctaaataggaggccaaaaccgccggcaggttcaactcaattaccgaacgaccaccacaattcaaaggtgggaggggcttgcccccgatagcgacagaccagtctccccggacccgaactggccctcaccgcccttccagcaaagccccagcctgatccagcaacgccaacggatcactcgccttatgaatatccaccgacaacaactgcctgaacttgcgcgcccccggaaaaccagtgcccaaccccagaatatgccgagtgatatggtgcatcgaaccaccactggccaaatgctccgcaatatacggccgcaactgcaccagcgcctcagcccgactgatcaccggcgcctcactgccaaacaactgctgatccacctccgccagcagatacggattgtgataagcctcccgacccagcatcaccccatcaaacacctgcaaatgcgcctggcactgctccagcgtcttgattccgccgttgagcacaatctccagctccggaaagtcctgcttcaactgcgccgccacgtcataacgcaacggcggaatgtcacggttctccttcggcgacaacccttccagaatcgcaatccgcgcatgcacggtaaaactggtgcaccccgcgtccttcaccgtcccgacgaaatcacacagctcggcgtagctgtcccggccattgataccgatgcggtgcttcaccgtcaccggaatcgacaccgcgtcacgcatcgccttcacacaatcggcaaccagggcaggatgagccatcaggatcgcgccgatcatattgttctgcacccggtcgctggggcagccgacgttcaggttcacctcgtcgtagccggcggtttcggccatacgcgcgcaagccgccaaatcagccggaacactaccgcccaactgaagggccagcgggtgctcggcttcattgtggcgcaggaaacggtcgtggtcgccgtgcaggatcgcgccggtggtgaccatctcggtgtagagcagcgcgtgcttggagagcaggcgcaggaagtagcggcagtggcggtcggtccaatccatcatcggggcgacggagaagcggcgggagagggcttgcgatggagctatgactgaaggcattggagtcttggatggagaatgcgaaggacgggcagtttatcaggaatgggtcggagggggctgggtgttgatcgtcgtgtcgcgagaaccaatattgaataaatccgtcccttttttcccataggagggataggcgtaataggtgattgcatattgagatcacgggctaaaaagagtaggttgctttgcaacgctgaagcttcttaacgttgttgaaggactgtattgtgaaaggaatcaagccgtttttagtgttgcgatactcgctgatcgaaaataagcaaggtgcccttgttccttccccgttacctaaacctaagggcgcggttgttgtagcggccctccaggatgacggtcgtgagtttgttaaaaacaaagttcgttatagttttgtggggttctcgtatgctgaacccaccgctaacgaatttcctaaagacaggtttttggtgggaaagactgctaagcataagttaactaaagttggtgataaggttcctggtgatatagttgcccacgacgctgatgattgggttccagtcattactgtggttgatactgtggatcagtatatttttgtgcagcatgattggcgatttggtacggatgaacaaattgcaaacgcaattcaagcagggcttagggatcctgtcttgaatgagtttaattattcaatatttattgagcctaagactattaggggtgaattttggaatgttgttaggtctcatagaaagatttttgaaattgagcttgaactcatctctccaaatattttagaaactaacataaaggctcgtgatgctctgagggcaatgaaggagctcttcggtcaggatgaggtgaagatcttactgagcaatgagtttggagatctcaaagttccggcttcccctgtagaagactatattgattatattgaggaaggggaaggtaaatggagtgtaacaactgagggcgattacaacggtaagcaagtacataaaagtacatctgccattgtgaaaattgatttaaatgtgccttctgatgatgtggtaatgcaagagaatcaattggaacttgaaactgggcagccggccccaggtcgttctcttcacgatgctcgaatggtggctgaagtgtattctgctataggtgatttgttgaggcgttagcatgattcgcctaatatttattttcattgcatctttcaccctttgttacctgtcgctatgggggacggggggagcggtgagcccactattcagtaatgtaaattcggttttgttcgttttaggcgcgctgtttggtgctctttcgttagctttctttaactatgttgagggtgttatgaaagatgttccgaaaaaattgaagcagcaaaaacctacagcttatgcaatagttgttgatactttgacgaatttgaagcgtgaggttatcgttaatgtcgttttggtagttatttttttaatggttgcattcgtattgggtgcaatgattgaaatggcatttatgcaaatgttagagatgtcaaagttttgggtgtggtcagtcttgtcggttcgcggagcttgtctttttagtgttctagtggtggtgtttgtccagttgtcggggttcgtgacagcgaacaatttacgggctgaaatttccatgtatggtgagtaacgtcttgtggtttttcacagtcttaaaatcgcgggtcttatgctaaatctcgcgcgctgctcaccctattagtcgactttgctcccgggtagatttttcacgctgatagtcgatgatagtgcgcacaccacaatatcctgttcgcagtccactatgtttttaaggagttttcccacacttatctcggcttgcccctcagaccacccatcgctaacctccgcaagtcgctgcaaacccagcgaccggaggtggaagtccgtattgctaaggcgttttaactcccggaaatatttggagcttcgcccatgcctaacaaatcacgcagtccttatgtcggtcaagacagtgctcccgccgaaaacccagccggcaacttgttcctcgtcagccccaacatcgacaccgaaaccctcctggccaacgccgccgaaaacctcgcatccgcgaaccaaatggccgccaatctggccttcgacctcgatgacccgcaccgcgccatcgtcctgggcctccaacaactcatcgatctaagtgctctactcatcgaccgagtccaggaacacgtcgcacctgccgcctgtaaggccaccgcctgacacccaaccccgccgccttaccccaaggcggcaacctgaacccatcctgtcacccagcaaagtttcatcatccccggcgcttttgaggtctacgatcctcttcaagagaggacctccgcgcctccattccacagggaactgaaaccatgatctcgaacctcgttaaagtcgtgatggttgctggcacgttgctgttgggcgcttgttcgacagggtcggccggcgtgagcagtgacccgtgtttttcaggcggatgccaggcgtttggggaccatagccccagcaaagccgccaagatgaattttggcggcagtgggctggggagtagttatggggagtatgggtcagggttgttgcatgatgattgatggggtggtggggcagtcattgggggggtgactgacccattgccatcgggggcaagccccctcccacattggagctgtgatcggcgcaaaaccgggggcgtcagtgcccccccttcatgcggcgggcgatgaggtagatgcccaggccgatcagcgctgtagcggcgccgatatagccggtgctggtccagccgtacccggctgtaatcgccatcccgcctagccacggccccagcgcgttcgccaggttgaacgccgcgtggttcgacgccgccgccaggctcggggcttcgtgggcgatgtccatcaagcggatttgcaggggggccgccatggcgatcatggtgccgaccaggccaatgcccagcagtacgctccacagcgaactggcggcgaaggtgaagaagatcagcacggccatcgaccacaccatgatccagcccacggcgcgaaattgcaggcggtcgaacaacttgccgccggcgatgttgccgatgatgccgcctgccccaaacgcggcgaggccgaagggaatccactgcggcgagactttggtcacttccagcatggtcggcgccaaatagctgaacacgcagaacatcccggcaaacccgatcgcgccaatcgacaacgccatccacacctgcggcttagtgaaggcgcgcagttccttgcgcgggtcgctgcgttgttcgtcatggcggtggggcacgaattgccagaccagtgcgatggtgcacagggcaatcacgctgaccagtgcaaacgccgagcgccagcctaggtgttggccgaggaaggtggcgatggggttgccgagcagcatggccagggtcaggcccatcattacgcgggccacggcgccggcgcgtttgtcgttggggaccatgctcgaggcgaccacggcggcgatgccgaagtaggcgccgtggggcaggccgctgataaagcggaaggccaccagcgagccgaaggtcggggtgaaggcggtggccaggttgcccaaggcgtacaggcccatcagtagcaacagcatgtgtttgcgtagtagcttggcgccaagaatggccagcagtggcgcgccaaccatcacgcccagggcgtaggcgctgatggcgtggccgacttgcggttcgctcaaattgagattgtgggcgatgtcgggcatcaagcccatgatggcgaattcgccggtgccgatcgcgaaggcgcccacggccatggccgcttccattttggcggcgccgcgcgcgggcagcacatgcccgggtgtttgctggatagtcatgggtaactctggttggatggagcgcacgaaggagagccgccgatgctacgcaagcagcggcaaaggtgtctagaacagcggtttgcgtgagagttccaggcctgtgaccccaggtcgcgcctgccacgcttgacatcgacgggttaaaagctgcgatttagagctgtcaattggccaaacggcgcataaacgccgtttgccgtgatattctgcgcgccgtcctggtctagcatcccctgggtacgtacgtcccagcggttggctgtcgcccaggtagctgaagccaataatgataagaagtcagcgcagaagggacataaacagtgaggtcgatacgtcggccttgtgtgcccaccctgcggccctctcgtgaatgtgcataccccgcggtgctgccttgcgcagctgtgatggagggttgcccatgatcaggggcggtagggcggatggcgttttatcataggtgctactgatgtttaaaaaagtaaacactgccctgctggggctggctttgtcgctggggatcagctccgttcaggcggaagaggcaaagaaagtcgatgtgctgctgattggcggcggcatcatgagtgcaaccctgggtgtctggctcaatgagctggagccgggctggtcgatggagatggtcgagcgcctggatggcgtggccgaagaaagctccaacggctggaacaacgccggtaccggtcactcggccctggctgagctgaactacaccccggaagacaagaacggcaacgttgagatcccgaaagcggtcgagatcaacgaagcgttccagatttcccgtcagttctggtcctggcaggtccgccagggcgtgctgaaggacccgcgttcgttcatcaacaccacaccgcacatgagctttgtgtggggcgatgacaacatcaagttcctgaaaaaacgctacgaagccctgaaggccagcccgctgttcgccggcatgcagtactccgaagacccggcgcagatcgccaagtgggttccgctgatgatggaagggcgtgacccgaaccagaaaatcgcggccacctggagcccgctgggtaccgacatgaacttcggcgagatcacccgccagttcgtcgctcacctgcaaaccacgcctaagttcgacctgaaactgtcgagcgaagtgcaggacatcaccaagaacgccgacggttcgtggcgtgtgagctacaaaaacctgaaagacggcaccaagaccgaaaccgacgccaagttcgtgttcatcggcgccggtggcggtgcactgcacctgctgcagaagtcgggcattcctgaagccaaggaatacgctggcttcccagtgggcggctcgttcctggtgaccgataacccaaccgttgccgagcaacacctggccaaggcctacggcaaggcttcggttggcgcgccaccgatgtcggttccgcacctggacacccgcgtgctggatggcaagcgcgtgatcctgtttggcccattcgcgaccttctcgaccaagttcctgaaagaaggctcgtacctggacctgctgaccagcaccaccacccacaacatctggccaatgaccaaagtcggtattcgtgaatacccactggtcgagtacctcgccggccaactgatgctgtccgatgacgaccgcttcaaggcgctgcaagagtacttcccgaacgccaagcaatccgactggcgcctgtggcaagccggccagcgcgtgcagatcatcaagcgtgacgaagagcagggcggcgtcctgaaactcggcaccgaagtggtcagctccgccgacaacaccatcgcgggcctgttgggtgcatcgccaggcgcgtccaccgcggctccgatcatgctgaccgtgctgcagaaagtgttcaaggacaaggtcgcgactcctgagtggcaggccaaactgcaccagatcgtaccgagctacggcaccaagctgaacgacagcccggaagcggttgccaaggaatgggcctacaccgccgaagtcctgcaactgcctacgccgcctgtgattccacaaatggctgccccaaaggctaccgaggctgccaagcctgcggctgagccaagcaagccggcatctgacctggcgctgtaagccaggctgatgcacaaaagcccgctgaaccggtaacggtcagcgggctttttcatggccgtgagaacagttcagcaacctgacagacgccacctgttaaaaatattccagagccaagcaggagcgaggccgcaacaagggggcattttttaccagtgtcagtgttgggcgcacgcgcccgagggttttttgtatgtggctacgttatgcagcattggcggccatggtcgtcgcggcatccggatgtgtgcaagagcgcgtcgtgcacgagcgcaggccggtgcaacgtgagtatgtggaagtcatcgcgccacaaccgccgccggtgcaggtgatcgaagtcgagccgcccgtgcgctacggctacgtctggtcgcgtggttactggcgctgggacggcgggcgatatgtggctgtacacggccactgggagcctgtacgtgaaggctatcgctatgtgcatccacattgggtgcagcgcaatgatgggtatcactggcagggcggtggctgggttcgctgagccctggtttcatcggcaacgagcgttaaatcggcttctgggtgcccaggagccgaacctcccgcagcaacgcggcgccgagttgatcggtgcccagttcccggtagcccacggcctttacctcgccgttctcctccgcctggataaggatcaccggggtttccttgccggtggtttcgtcgacatgcatcgcgtattgggggatatccagcttgatcggcgtccccgccgccttgcccttcacattgatcaggaaggcggcgcaaccgctgtcgacatccgcagtggtggcggagcggccgctgacaaagcaggtctttggtagatcgggccaggtgatggtgtcggccagggcgagagtgggggccatggccagggcggcgagtagaagcgtgcgcacgtcggtctttctctcgatcaaggtgaaaacggtttgtaccaaagcccgcccgcggccgcaacgccagggttcaggccagccgcttcatgccggtggtcttgatcgcgttgaggtcgaaggttgccgtgtattcgcaaccggcggcgtgggcgcagcgctcgatcaggcagtctgcaaagtcagccttgttcgccacaaacttgcgcagcgcctgccagatgatctccccatgctctacggtcaattcgcgggtgcgcagcagggtctcaagcactatcaccacatcacttttggccgactggtagcagctttgcagtacccacaccagctccacaatggagaccaggctgataaagcccggcgaggcggtggtcagtgattcgatcagctcggatgccttggccgattgcacgggatcatcctgggtgacgtagcgcaccagcacattggtatccagcccgatcatccggcttttgccccctgcgctgcgatggcttggttcatctcttcgatagagatggtcctggcaggcttgcggatcaaccctttgaggtcatgcaccgttttgctcgcggcaatgatggaaaactgcccatcttccatttctacgaattcaactcgatcacctgtttccaggccgagggcggtcctgacctggacaggaatggtgatttgacctttcgaggtcagtgtagcgatagccatgttgaagatctccatcgtgatattccttaccttagggtaaggaatgacagaggacaatatccgttggtccatagggtgctcatctggtgtgggttagtcggaacaggtaaaacactagtcccaactgcccacgcccgctgggcctaaagagatacaaaccatgaccgaccgccacctcgttatccctgcctccatgcaccccatcgtcgagcgcgccggctacgtgcctgcggtcaaggttggcaagacgttgtactgcgccgggcaggtcgggcgtacggctgggttggcggtgatcgaggaccccgcggcgcaattcgtcgcggcctgggacaatctgcggcaggtgctggaagagggcggttgcacgttcgacgatgtggtggacatgaccacttatcatgtggatatgagccagcacatggcggttttccgtgaagtgaaaaaccgcctgtttccacgtgggcattgcgcctggaccacaatcggggtgtccgaactggcgcaccccggcctgctggtggaaatcaaatgtgtggcggtacagcgctagcttattgcaccacgcggtagcacggtacatacgccgcgccgcccggcaacttcatgcggtgctgggcgacgaaggcctgtagcaactcgtccagcggtttcatgatggccgggtcgccgtggatctcatacgggccgttctgctcgatcaggcggatgcccttgtccttcacgttacccgccacgatccccgagaacgcgcggcgcaggttggcggcgagttcatggggcggcagggcgtggctcaattgcaggctggccatgttctcgtgggtggggtcgaacgggcgctggaagccttcgtcgatcttcaacagccagttgaaatggaacgcgtcgttgcgctcgcggcggaaatgcttcaccgccttgaggccggcagtcatctggcgtgccacttccgccgggtcatcaatgatgatctggtagtgcgcctgggccgcttcgcccaaggtggcgccgacgaaggcatgcagttgttgcaggtacggcgcggcgtgtttcggcccggtgaggatgaccgggaacggcaggtcacggttgtccgggtgcatcaggatgcccagcaggtacaggaattcctctgctgtaccggcaccacccgggaagatgatgatgccgtggccgacgcgcacgaacgcttccaggcgcttctcgatgtccggcaaaatcaccagttcgttgacgatggggttcggcgcctcggccgcgatgatgcccggctcggtgaggcccaggtagcgcccgccggtaatccgctgcttggcgtgggaaatggtcgcgcctttcatcggacctttcatcacgccagggccgcaaccggtgcacacgtcaaggctgcgcaggcccagctcgtggccgaccttcttggtgtatttgtattcttcggtattgatcgagtgcccgccccagcacaccacgatcttcggttcgacacccgggcgcagcgtacgggcgttgcgcagcaggtggaacacgtagtcggtaatgccctgggagttgctcaggtcgatgcgctggctgtccagctcgttctcggtgtagacgatgtcgcgcagggcgctgaacagcatctcgcgggtgctggcgatcatttcgccatcgacgaaggcgtcggccggagcgttcagcagttcaaggcgcacgccgcggtcctgttggtggatgcgcacttcaaaatctttgtaggcgtcgaggatggtcttggcgttgtcgatgtgcgcgccggtgttgaggatcgccagggcgcattggcggaacagggtgtagatgctgccggtgccggcttcgctcagttgctggacttcacgttgagacagggtttcgaggctgcccttggggctgacggaggcattgatgacttgacgttggggcattctgattccttgaaagcgcagccaccgcacccgcaaggggccgcgatggcttgagaatgatgggcgccgaattcggtcgcacgagacggttatttacctcacgcgcaaggtcgagcgcaaataccgtccagcaccatcatgccgcagaactcactgaatcagcttccagtttttgtagaaaacccgacgcagggtaaaggccatcccggcaaacccagcgatcacggcattgagcacccgggggatcggcgtcggtcgcacgatatcgataaacaggcagtaacgcttggcgtcgtttttgttgaaagacgcatgcatcaaggtgtcatcgaaaataaacagcgggtcgtcgtgccagtaatgcttgtgctggcccacctggatgtagacgccctcgtgatgcggtgccggggccatgttgtagagcacgcggaacatcatgcgcagcgggccgaagtgaaaggaggtcgagcggttttcattgaacaccgacacaccgatggtcttcacgaacggcagtttttcgcgcagtttcggaatgtccagggtggtctcgatggcttggccgtaccactggaagaacaacatgccgcgtttcttctcggccatgcgctcatccaggtagccgatgatttcgtccttgtgggccatggcatcgttgatcacctgttgcaggtcttcacgccaggcgggtggcaggtcggccatggtgtagacgtggcggttaggcgaactcaacaggtcgaacaaggtgttgaacggggccagcagccaagtgttacggccactgccgataaaatactttttgatcgtcgtgcggtcgtacagcccgttgcgcaaaaagtcatagacaccacacaccagcaccaggcccaggaacaccagggtggtgaccgggaagcaataaataaccagcagcacgccgatgatccaggcggccgagactattttcttgcggttgacactcgcactcatgaaactcaactccaacgggggaaggtgcacgagttccagtcctcatggcacccagagatgcgaagacatgaaacataatgaaacaatctccctatgatagggctttcccccgcagccgggcgttttaaatattgcgaaattgtgaaggctttacacagtttttaaccccggcggcgctgtgtggattggattttgtaaacagaagatttgcgactatcgtgacgcttcggttttttggacgtcatagaccggtacgattgaagttgaatggccaccactggccttcggcaccttggaagaggcagaaattttatgatcatcaaaccgcgggttcgtggcttcatctgtgtgaccgctcaccctgttggctgtgaagcgaacgtcaaggaacagatcgactacgtgacccaacacggcgtcatcgaaggcggcccgaaaaaggtgctggtcctcggtgcttccaccggctacggcctggccgcgcgcatcagtgccgcgtttggttgtggcgccgacaccctgggcgtgttttttgagaaagaaggcgaagaaggcaagctgagctccgccggctggtacaacagcgccgcgttcgagaagtttgccgtcgaaaaaggcctgtacgccaagagcatcaacggcgacgcgttctccgacgagatcaagcgcctgaccatcgacaccatcaagaaagacctcggcaagatcgacctggtcgtctacagcctggccgcgcctcgccgtaccgacccgcaaggcgtggtgcacaactccaccctcaagccgatcggcaaggccgtgaccctgcgcggcatcaacaccgacaaaggcgttgtggtcgacaccaccctggagccagcgacccaggaagaaatcgacggcaccgtcaaagtaatgggtggcgaagattggcagctgtggattgacgccctgcgtgacgccgacgtcctggccgaaggcgccaagaccactgcgttcacctaccttggcgagaagctgacccaggacatctactggaacggctccatcggcgaagccaagaaagacctcgacaagaaagtcctgaccctgcgcgacaacctcgccgcgctcaagggcgacgcccgtgtgtcggtgctcaaggccgtggtcacccaggccagctccgcgatcccgatcatgccgctgtacctgtcgctgctgttcaaagtgatgaaagagcagggcacccacgaaggttgcatcgagcaggtctacggcctgttcaaggacagcctgtacggcagccagcctaaactcgacgccgacggccgcctgcgtgccgacctggccgagctggaaccgaaagtccaggacgccgtggcggccctgtggaaccaggtcaccgacgacaacgtcaacgaaatcagcgattttgccggctacaaggcggagttcctgcgtttgttcggctttgaaatcgacggcgtggactacgaggctgacgtgaatccgaccgtgaagatcaacggcctgattcaggcgtaagtgatccggttcaaaaagacggcccttcggggccgttttttatggccgctgaaaaaggctgccttcagaaccctcttacacatttttgagcagcgtccgatcgctccgatatgccagactccagccgctatcacattcaggctaacggaggatctgatgacgattcgtgcagtggtttttgatttcggcggtgtcctgttcgactggagcccgcagcacctgtaccgcaagctgattgccgacgagcatgagcggcaatggttcctcgataacatctgcacccaggcctggaacaccgagcaggacgccggtcgctccctggccgatggcacccgcagcctgatcgagcaatacccgcatcatgagcgtttgattcaagcctattacgaccgttggcacgagatgctgcgagggccgttgccggaaggtgtggcgatcctcgaagcgttgcaccgagccaatatgccgttgttcgggcttaccaactggtctgccgagacgttcccctatgcgcgggccaattacccgttcctgcagtgttttcgcgacatcgtggtatccggcgagttgaagctgatcaagcctgacgcggcgatctatcacgccagcctcagccaggtacgtgcgcagttgccggatatccagccggctgaagtggtgtttatcgatgacgttgccggcaatatcgaagcggccatcgcactgggctggcaggggattcaccatgtgtctgccgagcgcacggccgcgcagttgcgtgagttgggcgtgggcttctagcgcgcccacttttccatggcgaaatccacgaaggcgcgcagcttgggcaggcgatatcggtcctggccgtagagcagatgcatggggcggctgggcagtcgataggtggtcaacaaggccaccagtttgccgctctccaggtccggttgtaccagggcatcggccagcatgatgatgcccatgccgttgacgcccgcctggcgcaagccttgcgagctgttgatggtcaatgagccggacactggcacttccacctcgccgctatcgtcggtcatgcgccagagtttttcggtgtcgcgccaattgtcatttgccgggtaggcgaacgccaggcagtcatgttgcttgaggtcctcgggtttcgaaggcgtgccgtgtcgtgccaggtacgcaggtgacgcgcagagggtgagggtgtagtcctgcattggccgagcaatcaggctcgatgcttccagttcgcccagacgtatcgccacgtcgaagccgctgtcgaccaagtccatccgctcgttgctcagcaccacgtacaggttgatcagcgggtagcgccgggaaaactcgctcaaggccggtgtaaggcgttcggtgccgaatacggggggcgcagtgatgcgcagggtgcccttggggacatcactatgggcttgttcggccagttgctcggagtcggccaccagccccaatacttccaggcagcgctggtaatactgcccaccaaattccgtgaggctctgtttgcgcgtggtgcgcttgagcaggctgacgcccaggcgttgttccagcgcgcgcaggtggttgccgaccatggtggtcgacatcccgcaggcctgggctgcggcggtcatgctgccagtctcgaccacttttacgtacaccgacattgcctggaacagatccattatcaagtcctgatttaaagtcattgcaggaatgtgcagtttatccagctcaggtggctaacgatactgaagccatcccaacgatgcactggagcccgcaccatgaccgccgcctgcctgatgaccacttaccaacccctggcgctgagctttacccgcggcctgggcacgcggctgtgggaccagcagggccgcgaatacctggacgctgtggcgggtgtggcggtgaccaatgtcggccactcgcaccccaggttagtgacggccatcagtgaacaggccgggctgttgctgcacacctccaacctctacagcatcgactggcaacaacggctggcccagcgcctggcccaactgtctggcctggaccaggccttcttcaacaactcaggggccgaagccaatgaaacagcgctgaaactggcgcggctgcatggctggaaaaagggcattgaagagccgttggtggtggtgatggaaaacgcttttcatggccgtacgctcggcaccatggctgccagtgatgggccttcggtacgcctgggtttccagcggttgccgggggactttctcaaggtgggctttggcgatctggctgcgcttgaagccatcacccagacgtttggcgcgcgtatcgccgcggtgctgctggaaccgatccagggtgaaagcggcgtactgccggcaccgccgggctacctgaaagccctgcgtgatcactgcacccgccatggctggttgatgatgctcgatgaaatccagaccggcattggccgcaccggcgcctggtttgctttccagcatgaaggcatcgtcccggatgtgatgaccctggccaagggcctcggcaacggcgtacccatcggcgcctgcctggcgcgggctggtgtggccgagctgttcacgccgggcagtcacggcagcaccttcggcggcaacccgttggcctgtcgggtcggctgcaccgtgctggacatcatcgaagaacaaggcttgctgcagaacgcggcgcaacagggcgagcgcctgctggcgcggttgcgggtggaattggctgagcacccgcacgtcctggcgattcgtgggcaggggttgatgatcgggatcgagctcgcgagcccttatcgtgacctggcccagcgcgcggcccaggaacacggcctgttgatcaacgtgacgcggggcaaggtcattcggctgctgccgccgctgaccctggatgccaaggaggttgagatgatcgtgcgggccattacccggttactggatcaggcccattgagccattcctggttcagggtttcggtatcgcccaggtactccaacaaccaggccatggccggggacagcttgtcctgtgcccaggccacacacgacgggctggccggaaacggccggctcaattgcagcgccaccaactccccgcgttcgatccatggcaacacctgatgcgccggggccatgccgacacacaggccatcacgcaggcaatcgagggccgaggaccaattcggcactaccagccgtcgctggttatccagggtccaggtgtcgcgcttgggcaggttgcgtgatgtgtcggtcatgcacaacgaggcgaagggccgcagttgatcgtcactcagcaagccttcgacgctggccaacgggtggcgcgcgctgaccacacacagccagttcaacaagcccatgtcgcgaaaggtaaagcggctggccaccggcaccgcgctggtggcgccgatcacaatgtcggtgcgctcatccgccagggcatcccacacgccgttgtacacctcgtactccagcaacagctcgacttcaggaaattgccgatagaaatcaatgaccaactgccggcagcgctggggtttgacgatggaatccaccgccaccttcaactggccactccagccgttggccacttgctggcaaaggcgtcgggtgccgagcatttttttcatcacgccacgggcttcctcgataaacagccggcccgctggcgtgagctcgacgtcccggtggcgccgcacaaacaacggcaccgccagccattcctcgatctgacgcaccgtatagctgatggccgacggcacccggtgcagttcctgggcagcggcgctgaagctgccatgacgcgctactgcgtcgacaacgtccagcgaatattcagaccacatggcggctgccttcaaatttattgataagagtgcccaattattatcgcttcacaccaaaactgtcagcttcataatgggcggcagtcagcaaatagtttgatggcaaggtcaacaaggcttcaatgaaaaattcttttggtttcactgcgtatctggcggggctgagcatgctcggttacctcgccatggacatgtatctgccggcgttcggcgccatgggcgagcaattgcagattggcgcaggcgcggtgggcgccagcttgagtatcttcctcgccggctttgcggtcgggcagttgttgtgggggccgttgtccgaccgcctggggcgcaagccgatcctgctcgccgggctgagcctgtttgtgctcggttgtgcgggcatgttctgggtcgaaacggcgccgcaactgctggcattgcgttttatccaggccattggcgtgtgcgctgccgccgtcagctggcaggcgctggtgatcgaccgctacccggccgacaaggctcaccgcgtgttcgccagcatcatgccgctgatgtcgttgtcaccggctttagcgccgctgttgggcgcgctggtgctgaatcacttcggctggcaggcgatctttggcgtattgctgggggtgtcgttgttgctgctgttgccgacgttgttcctgcgtactgcgcaaaaacgtcaggcagcgaagggtgaaccttcgcgcctgggttatgggcagttactgacgtctcgcgtgttcaccggcaatgtcatgatttttgccgcgtgctcggccagtttctttgcctggctgacggcgtcgcccttcatcctgggcggcatgggctacagcccgaatgacatcggcctgagctacgtgctgcccaccttggcgttcctggtcggcggttacagctgccgcagcgccttgcagcacttccagggcaaggcgctgttgccgtggctgctgctggcgtattgcatcagcatggtggcgttgtacttggtcgccactttgactgcgccgaccctcaccaccttgctgattccgttctgcctgatggcgctgtgcaacggtgccagttaccccatcgtcgtggcgaatgcgctgatgccgtttgcggaaaactccggcaaggcggcggcgctgcaaaatacgctgcaattgggcctgtgctttctcagcagcttgttggtgtcatcgatgatcgaccaaccgctgctgattaccgtgatcgtgatgctggcgaccgcgccgttggcggtattgggttactggctggcacggcccaaggccgatgattcggaactggcagccgcctagaacgtcacttccaggttcaccgtcggcgttgatgtgcggctgccccggccgccatccacgccgaatttgttatgccaatactcgtaacccacccccaggtacaggttcggcttcacgcttttgcccggtcgcaccgccaccatcagcgcggtgcgcatcagggcttccggcgcggtgtcgcgaccgtgatagtcctcgcctttttccccgacataattgataaaaccctggaatttcgccgcatggttggcgatctcgaacgggcgcatccatgtcagattgagcatgtaggtatcgtcgaaggtgtggttcgactcctgcgcgccggggatgccggtgtggttcctttccttgtagtacagcaggctcaggtccagcacgccgacggtgttgaacttcaaggtcgggccgatcaccagggcgcgcttcttggctgaggcgaagttgttgttgcggttggcatcgaaacccaacgtcagcgcgtaatccttgaccaggccgctgcccagcggcacatcgaacacccgcgacgcatacaactggtggcggtatacgacatacacctcactcccgccatgatccgtacccttgcgcgggtcgcggctgtcggacaggaacacatcgaggttgaggaagttgctgccataccggtagccgctggcgtgggtgaagctgtagatgcgcttgctgaattcgtcgggattgttcgggttggtgaactgctgaccgtagcgaaaccctacgctgttgttcatccattccaccgcgacggcctccccgccgccgaggagggtgagtgcgacggttgcgccctgtagtgcctttttcattgttatgggtcctttggcgttctggctcatcacggccggattgtttttgtaacgccgatggagggtaacttgttcgattgattgtatacaactctatggacatccagtccgaacattgcatacagtgaccgcacaacaaaaacagagaacccctcaccatgactatcccgaaggcgtcaccgcagcggccagaagatgagaatctcggcgtcgccgccaacatggcttacggcctgcaacatgtgctcaccatgtacggcggcatcgtcgcggtaccgttgatcgtcggccaggcggcaggtttgtcgccggcggatatcggcctgctgatcgccgcgtcgctgtttgccggtggcctggccacgctgttgcagaccctgggcctgccgtttttcggctgccagttgccgctggtgcagggcgtatcgttcgccggtgtggcgaccatggtggcgattgtcggcagtgatggcgccggcggtgtgccggcgattctcggcgcggtgatggccgcgtcgtttattggtttattgataaccccggtgttctcgcggatcaccaagtttttcccgccgctggtgacgggtattgtgatcaccaccatcggcctgaccctgatgcccgttgcggcgcgctgggccatgggcggcaatagccgcgctgcagatttcggcagcatgtccaatatcggcctggcagcgttgaccctggtactggtgttgctgctgagcaagatcggcagcgcgaccatctcacgcttgtcgatcctgctggcgatggtgatcggcaccgtgattgcggtgttcctcggcatggccgacttctccggggtgacccaggggccgatgttcggtttccccacacccttccatttcggcatgcccacctttcacgtggccgcgatcatttccatgtgcatcgtggtgatggtgaccctggtcgagacctcggcggatatcctggcggtgggtgaaatcatcgacaccaaggtcgattccaaacgcctgggcaacggcctgcgcgccgatatgctgtcgagcatggttgcgccgatcttcggttcgttcacccagagcgccttcgcccagaacgtcgggctggtggcggtgaccggggtcaagagccgcttcgtggtggccacgggcgggctgttcctggtgatcctcggcttgttgcccttcatgggccgggtcatcgcggcggtgcccacttcagtgctgggcggggccggtattgtgctgttcggtaccgtggcggccagtggtatccgcaccttgtccaaggtcgattaccgcaacaacatgaacctgatcatcgtggccacttccatcggctttggcatgatcccgattgcggcaccgagcttctacgatcacttcccgagctggttcgcgactattttccactcggggatcagctcatcggcaatcatggcgatcctgctgaacctggcgttcaaccatttcaccgccggtaactcggaccagcagtcggtatttgtggcggggaccgagcgtagcttgtgctttcgcgatgtgtcggaactgcgtgatggggattacttcaagggcggcaagttgtttgatgcgcagggcagggaaatcccgttggtggcggaagtgtcgaagaaggccgcaaagcctcaaaccactgaggtctgaatgtgggagggggcttgcccccgatagcggtgtgtcagcaaccaatcacttagctgatccaccgtcatcgggggcaagccccctcccacaattggaatgcatccagcttgagcattcagccggccttgagcactttgtattttgctgaacacacctcatccagaaacttcaccacagtccccatgcacgcctggcgttcttccacatggggcatatgactggagtcttcaaacagcgcccagcgcacatcggcgatttcatccaggaacggcttgaccaccagcggcgtggcctcgtcgtgccggcctgagatcaccagggtcggtacattgatcgccgacaggcggccagtggatttccagtctttcaagctgccgatcacatggaattcggtcgggccgctcatggcgtggtacaccgtcggatcggcatcgaccgcggcgaaggtgcgtgccacttcctcgggccacgggatgacccggcacacgtgatggtcatagaacacccgcgatgcggcgaggtattccgggtcctggtagttgccggcggtttcgtgcttgagcagggtttcatgcacgccttcaggcaataatttgcgcaggcggttggcttcgctgacccaggtgcgcatgcacgtcggcgagttggccgggatgaacgcacgcaggcccttgggttgcaggatcgcgtgttcactgccgagcatgccgccccaggactgaccgaggatcgcgtagttatcgctgatctgcaggtggtccagcaggttgttcagctcttcgagaaacaggcctacggtccagaaggatggacctttgtcgggcagatgagtggagcggccgttgcccagttggtcgtagtggatcacggcgtggccgctggcggcgacatccttgaacgcgtcaacataatcgtgggtacatccggggccgccgtggataaccaccaggggcgtgcgaccgctggagaggtcaccggtgacgcggtaccaggtttggtaggcgccaaacgccgcatacccttcgcggattttttcgatgaattccatttcgtgccctgctctgaaaaaaggatcggggacacgataatgggtgaaagaaatttaagtaactagcaaaacagctaggttttgcccggcggtcaatcgtcgagcaggcggtaatgggtggcgcgcaccaccgcttgcacgcggttcttggcccccagcttgtgcatcgccgaggccaggtgcagggtgaccaccgccagggaacggctcagttgtgtggcaatttcggccgcagtcatgccgtcggcggcccatttgaggcactcgcgttcgcgtttggtcaggtgaatgtgcgggtaagtgcgtagctctttgctgaacagcgggtaggccgcttcctgcaaggcatgggaaatcaggccgaagtccgacagggtctgctgcgcatcctgcagcacgttgcgagcactgccggtacgcagcccggtcagcgaggcaaaaccaccacggggcaggtggatcggcacgctgacgccgcaggtcaattgctggtcatgcaggtaggatgaaaccggcgcatggcagggatcgatgatcttttgcagcggggtgtcggccttgacgtcgtaggaccagacgaacggcgacacccggctcagggccagatgttgtaccgggtcaatctggtagaacccttcgctgcaccacaaggcatgccagtcgggcggggtgttgcgcagttgcagcaccgaaggggtgatcaatgcaccatcctggtcgatcggcaccggggtgtagtcgtacaccaaggcgtcgaagcccagttgctgggcgaggataaaggtgttgtccatctgctcgtccaggctcctgcccggcatcagacggtgatttaaggcagtcagcttggccagcatccgttctgctcccgaattcgtttgaatctcgacttgctgcaagtagaatgccacgccccggcgaaggactgccaggccaaacctataagaaatgctaggttatggacgcgcggcatcctcggtagtgttggcctgataaacggcccgctacctgccaggccgacactacacaaggaaagtatgcatgtggcgtgaaattgcccccgaccagcagtacaacgtgcaagtcgatggccataacctcgtggtctacagcttcggcgaaggcgatgaggtgctgctatgcctcaacggcgggccgggcctgccgtgtgactacttgcgcgacgcccatggctggctcaaggaccataacctgcgagtggttgcattcgaccagcttggcacgggcgcatcagccagacccactgatatttccctgtgggaaatccgccgttatgtcgaagaagtcgaaactgtgcgccaggccctgggcctgggccgtgtgcatttgctcgggcattcctggggcggctggctcggtatcgaatacgccatccattaccccgacgcactgaaaagcctgatcctcgaaaacaccgtcggcgacattccgcacctgtcccaggagctggagcgcctgcgcggcgccctcggcagcgaaaccgtggccatgatgcaacgccacgaggccatgggcaccctcgaccacccgcaataccaggcggcgatcaccttgctcaactaccgccacgtgtgccgcctcgatgaatggcccgagccggtcaagcgttcccttggcgactggaacatgggcccctacgaaaccatgcaggggcccaacgaattcctctacatcggtaacctcaaggactggaaccgcatccccgagatggccgaattcaagatgccgatcctgatcaccaccggccagcacgacgaactcaccccggcctgcgccatgcgcatgaaaatggcggcccgacacgccgaattgcatgtgttccccaacagcagccatatgcctttttacgaggagccccaggcgtatttcccggtgttgctggacttccttgctcgtcaccgaggctgacggatgaacctggcgcgttatcgttttgtgctgtcccggccgctgcagttgctgccggtgctgtttggcatcagcctgatcacctttgtgctggtgcgctcgatccctggcgacccggcgcgcgccttgctgggctcgcgcagcacaccggatgccttgctgaagatccgcgcccagtacggcctcgaccagccgttgtggctgcaatatttctacttcctcaagaacttgctgaagggcgacctcggccaatcgctgctgtacaaggtcgacgctctcaagctgattgtcacgcgcatcgagcccaccctggtgctggtactgggcagcgtggtgctggcgctgctgattgcggtgccgctggcgacgtgggccgcacgcaacaagggcggctgggcggacaacctgatccgcgtgttcaccacggttggcctgggcatgccggcgttctggctcggcttgatgctgatcctgttgctgagtgtgcagtggggcttgtttccggtgtccggctacggccgcacctggctggacaaggcgcatcacatggtgctgccgtgcctgacgattgccctggcgctgtcggcggtgctggtgcgcaacctgcgggcgagcatgctgatggagttgcaggccgatcacgtgaccgcggcccgcgcccgtgggctgtcggaaaccgccgtttttcgtcggcatgtgttgccaaattccctggtgccggcggtcaacctgctggcggtgaacatcggctggctgatcagtggcacggtggtgatcgaaagcctgttcgccatccccggcatcggccaattgctggtgcgcgggatcttcacccgcgattacatggtggtgcagggcgtggccatggtgctggcctgcgcgacggtggtggtcaacttcatcgcggacgtggtgacggtggccctcgacccacgggtgaagatgcaatgagcagccgcccgttgattgccccgtggcgcatgcgcctgcgcttcggctttcgcaatggccggctgacggcggcgtggggcctgttgattctgctggtatggctggcgcttgcgctatttgcgccgtggattgcgccgtatgacccgatcgcgcagaacactgatttcagtttgctcggtccgagtcttgcgcatccgtttggtacggataactacggtagggacatcctttcgagagtgatctggggcgcgcgcatcgacctgcaactggcgattgtcggggtgatcttccccttcatgatcggcaccttcatcggtgcggtctcgggctatatcggcgggcgtttcgacagtttttgcatgcgcgtgatcgacgtgatcctggcgtttccgttcctggtgctgatgctggcgatcatggcgattcttgggccgggcttgaagagtttctatatcgccatggcgctggtcggctgggtgtcgtatgcgcggctgatccgctcgcagatcctggtgctcaaggaaagcgagtttgccctggccgccaagagcctgggctttggccatgggcgcattctgttccggcatctgctgcccaatgcgatgttcggctcgattgtgttttccatgtcggacgcggtgctggtgctgctcaatggcgctgccgtgagctacctgggcctgggcgtgcaaccgccgaccgccgagtggggcaccatggtggccgaggggcaggcctttatcaccacggcctggtggatctgcacctttccggggctggccatcgtgaccctggccatgggcttcagcctgctggccgatggcgtagcgcaagtgttgggggatcgctcatgagcctgctgcaagtgcgcgacctcagtgtcatcgccaacaatgccgggcgcgatgtaaccctggtcgatcgggtgtcgttcgacttggctgaaggcgaaatcctcggcctggtaggggagagcggttcgggcaagaccatggcctgtcgcggcctgatgcgcctgctgccatcgcccagcctgcgcgtgcaaggcggcgcggtgcggctggccggtcaggatttgttggccttggatgacgctggaatgcgcgccgtgcgcggcggccaactgggcatgatcttccagaatcccagcagccacctcgacccgctgatgcgtatcggcgagcagattgccgaaggcattcgactgcatcaaggcgcgtcaaaaaaagacgcacgattgctggctatcgacgtgctgcgccaggttggcatccccgatccccaggcacgggtcgacaactacccccacgagttttccggcggcatgcgtcagcgcgcaatgatcgccgtggccctgggctgcaaccccaaagtattgatcgccgacgagccgaccacggccctggatgtgacagtgcaggcgcagatcctgcggttgctgctggacctgcgtgaccagcgcggcctgtcgatcatcatgattacccacgacctcggcgtggtcgcgcaaacctgtgattccatcgccgtgatgtacgccgggcgcctgtgcgagcacggcagcaagtacgacttgctggctcgaccccggcacccttacaccgccgggctgatcgattgccagcccgcccacagcagcggccacgccttgctgcgcacgatccccgggcagccgccgctgctggacgcattgcccgccggttgccgcttcaacccgcgctgcccgcaggtcggggcgttgtgcaccgaggtgttgccgcaaggtgctcgggtcgcctgtcattacccgttgggagcgcagccatgagcctgttgcagatcaaggaccttgaggtgaagtttgccgcgtccggcaccggcctgttcggcttgaacaagcagtgggtgagggcggtgaacggcgtgtcgctgaacctggccgccggtgaaaccctggggttggtgggcgagtccggcagtggcaaaagcacactgggccgcgccatcctgcacctcaacccgatcagcgccggccaggtgttgtttgatggcatcgacatggcccatggcagcgccatcgacatcactcgtctacggcatgaaaccgcaatgatcttccaggacccgtacgccgcgctgaacccgcgccacaccatcggtgaaaccatcgccgaggtgctgcgcgtgcagcgcaaagtcgcgccagagcagattcgcgcgcgcgtgaatgaactgctcgacctggtcggcctgcgccccgaactggccagccgcaagccgggctccctcagcggtggccagtgccagcgcgtcggcattgcccgggcgctggcggtggagccacgcctgatcatcgccgatgagtgcgtggcggcgctggatgtgtcgatccagggccagatcatcaacctgctactggaactgcaacagcgcatgaacctggcgatcctgtttatcgcccatgacctggccatcgtgcgccgcctgtgcgaccgcgtggcggtgatgtacctgggcaagatcgtcgaggagggaccggtggaagcggtctttacttcaccgcgtcacccctacacggcggcgttgatccaggcgattcccgagatcgatccgcatcggccgttacctacgcaacctttgccgggtgaaccaccgagcccactgaatttgcccacaggctgcgccttccacccacgttgtcggcatgcccgcgccatgtgttccgtggtgttgccgccaacgcatttcctgcacgagcatcggtacagttgcgtgcttgaagaacctttgctttgacccatccctgccattcatgaacaaggagttatgacatgcaatcgcgccacttgaagttgctcgccgccgccacactgaccgcctggtcgctgactgccggtttcgcgcaggccgccggtgtactgaccatcggctgccgtgaagacagcaccacgtttgacccgatcaaaagcgcgcaaaaccgcgacacctgggtcttcgccaacgtctacgacaccctggttcgcgtcgacaacctgggcaccaagatggagccgggcctggccgaaagctgggatatctccaaggacggcctgacttacaccttcaaactgcgtgacgcaaagttctccgatggctcggccattaccgccgacgatgcggcgttcagcctgctgcgtatccgcgacaacaaggcttcgctgtgggcggatccgttcaacctgatcagcacggccaaggcatcggacccgaaaaccctggtggtcaccttgaagaccccggctgtggccttcctctcgcaactggcgtcgccgacggtgtcgatcctgtcggaaaaagccatgaccaagatgggcgaagacgcctactcggaaaacccggtgacctccggcgcgtttaccgtggatgagtggcgcaagggcgaccgcgtgatcctgaagaagaacccgaacttctggcaggccaagaacgtgagcctggatggtgtggagtgggtatcggtcaccgacgacaacacgcgcatgcgcatggtgcagaacaacgagctggacaccgcgatcttcgtacccttctcgcgggttgaagagctgaagaaagaccagaacgtggtgatccacgccgacccgtccacccgtgaagatcacttgctgatcaatcatgcccacgggctgctggccaagccggaagtgcgtcaggcgttggacatggccatcgacaaacaatcgctggtgaagaccgccacttacggtcaaggcactgtggcttattcctacattccaaagggctcgctgtaccactacgccaacaacctgcagcgcccgtatgacccgaccgctgccaagaagctgttggagcaggccggtgccaaggacttgaagctcaactacgtggtcaatgccggcaacgaggccgacgagcagattgcggtgatcatcaaagaccagttggccaaggtcggtgtgactgccaacctgcaaaaggtcgacccgacccagagctggcagatgctggtggacggtgagtacgatatttcggtgatgtactggaccaacgacatcctcgacccggaccagaagaccaccttcgtgcttggccacgacaccaaccagaactacatgacccgctacaagaacgacaaggtcaaggacctggtggctcaggcgcggatcgaggctgacccggtcaagcgtgagcagatgtatgtggagttgcagaaactggcgaaacaggatgtgaactggatcgacttgtactacagcccgtacatcaacatctcacgcaagaatgtgagcaacttcctgcagaacccgttgggccgcttcaccctcgaagaagtggtgaaaaactaaaccacactgctgaaaaatgtgggagggggcttgcccccgatagcggtgggacagtcactgtatctgttgactgatccactgcaatcggggggcaagcccctcccacatttggttttacaatgtgccggttattgcgcgtcgaacgcctggccgttgatgccggtactgtccggccccatcaggtacaggtacaccggcatgatctcttccggagcaggccgctccatcgggttttccccgggatacgcctgggcgcgcatgctggtgcgcgtgccgcctgggttgatgctgttggagcgtactgctgccacatcctcaagctcatcagccaaggtttgcatcaagccttcggtcgcaaacttcgacacgccataagcgccccagtaagcccgacccttgcgcccgacgctgctggaggtgaacaccaccgacgcatcctgggacaatttgagcagcggcaacaaggtgctggtcagcatgaacatcgcgttgacgttcacgtgcatcacccgcatgaagttctcgccggacaactgttcgagcggcgtgcgcgggccgatgatcgaggcgttgtggagcaggccgtcgaggtggccgaattccttttcgatcatcgcggccagctcatcgtattgatggggcagggcggtctccaggttgaaggggatcaccaccggttgcggctggcctgcggcttcgatttcgtcatacacctgggccaggttggcttcggtcttgcccagcagcagtacggtagcgccgtgggcggcataggttttcgccgccgcggcgccgatcccgcgaccggcgccggtgaccaggatcacccggcctttgagcagttctggacgtgcggagtaatcaaacataaatagcctcgacagaattcagcagcttatgaaccccaactccgaaaacactgaagatccccagtgggagggggcttgcccccgatgagggcctatcagtccgataggtgcgggctggcacaccgctatcgggggcaagccccctcccacattggatcttcatagagggtgggggcgttgagtaatcagcaactgcacagtgcgttatcgagcaccttgcgcagttccagcgggtgatccaccaccacatcggcgccccaatggcgtgggttgtcgtccgggtggatgtagccgtaagtgaccgccgcggtgcgggtgccggcgtcgcggccggactcgatgtcgcgcaggtcgtcgcccacgaacagcacgctggccgggtccaggccgagcatcttgcaggccaggatcatcggctccgggtccggcttgctgtttttcacgtggtccgggcagatcagcagtgccgagcgttcggccaggccgagttgctgcatgatcggttcggcaaaacgcaggggcttgttggtgaccacgccccagaccagcttggacttctcgatgtcatccagcagctcggccatgccgtcgaacaacttgctgtgcaccgcgcagcccttgaggtagcgctcgaggaattcctggcgcagttcttcaaagcctggcgattccgggtccatcgagaaggtcaccgccaccattgcccgcgcaccgccggagatttcatcgcggatgtgctgcgggttgatcggcggcaggtcgcggtcggcgcgcatggcctggcagatggcgataaagtccggcgcggtatccagcagggtaccgtccatgtcgaagagaaccgctcgcaacttcacaggctcactcctcgcgcagggtctggatcatgtagttgacgtccacatcgttggccagcttgtagtgcttggtcagcgggttgtaggtcaggccgatgatgtccttgacggtcagcccggcctggcggctccacgcacccagctcggagggacggatgaatttcttgaagtcatgggtgccgcgcggcagcagcttcatgatgtattcggcgccgatgatcgcgaacaggtaggccttggggttgcggttgatggtggagaagaacacctggccgccgggcttgaccatgcggaagcaggcgcggatcaccgaggacgggtccggtacgtgctccagcatttccaggcaggtgaccacgtcgaactgctcgggcatctcttcggccagggcttcggcggtgatctggcggtattccacgctcaccccggactccaactggtgcaactgggccacggccaagggcgcttcgcccatgtcgatacccatcacggtcgcgccgcgttgggccatggcttcgctgaggatgccgccgccgcaaccgacgtccagtaccttcttgccggccaggttgacgcgctcgtcaatccagttgacccgcagcgggttgatgtcgtgcaaaggcttgaactcgctttcgcggtcccaccagcggtgagccagggcttcgaatttggcgatttcggcgtggtcgacgttgctcatggtgaatcctctaaatctgataaatcggtttgtcagtcttgaacgccggggttcaagaccttcgttattcgctgtgcccgctgatgcgttggccccaggcgatggccgtggtggtcaactggtgttcatccatgcgggtcaattgccggtcgtcgagcaattgcttgccggcgacccaaaggtgtttcacgcaatcgcgtccggtggcatatataagctgtgagaccggatcatagatcggttgttgcgccagccccgacagatcgaaagcaacgatatccgccgccttgccgacttccagcgagccgatctcactttccaggcccatggcccgcgcgccattgagggtggccatgcgcagggcgcgatgggcatcgagtgcggtggccgaaccggcgacggccttggccagcatcgccgccgtgcgggtttcgcccaacaggtcgaggtcattgttgctggcggcgccatcggtgccgatggccacattcacgccagcctgccacagacgctccaccgggcaaaagccgctggccagtttcaggttggattccgggcaatggatgacgctggtgttgctttctaccagcaaagccaggtcgtcctcgctgatttgggtcatatgaacggcctggaagcgcgggcccagcagccccaggcgacccaggcgtgccagcgggcgctcgccggtctgctcgaccgcttgctgcacttcgaaggcggtttcgtgaacatgcatatggatcgcggcgtccagttcttcggcgatcacccggattttttccaggttgtcatcgcacaccgtgtagggcgcgtgtgggccgaaggtgatcttgatgcgcgggtggtgcttgaggtcgccgaacagctcgacaccttggcgaatcgcctcgtcggcgctgccggcgccggggatcgggaagtcgaggatcggaatcgcgatctgcgcgcgcatgccgctgttgtgcacgcaatcgctggcgaccttggggtagaagtacatgtcggagaagcaggtgatgccgcccttgagctgttcggcgatggccaggtcggtgccgtcgcgtacgaaggcttcatcgacccacttggcttcggcgggccagatgtgtttttccagccaggtcatcagcggcaggtcatcggccaggccgcgaaacaggctcatcgcggcgtgcccgtgggcgttgaccaggccggggctgagcagcatgcccggcagttcgcgggtctccttggcggtcagtttcaacgccgcctggcgagtcccgataaaggcaatgcgcccatcgcggatgcccaggccatgctccttgagcaccacgccggcgggttcgacaggcaccagccacgtaggcagcaacaataggtcgagcggggcggcagtggcggtcatcgcaggcttcttcccaggcagctataaaagaagggcgaagtatacccgagcgtcctggctggcggatcgctataatcggcggctttgtttatgagtgcggagtaagggatgcgcgatcgactgttggctgcggagaaagtgaaggccatcgattggcgtgatggcgcactgtacctgctcgatcagcgtgccttgccgtcccgggaaagctgggtggcctgcgtgacggtcgatgaagtggctgcagccattcgctcgatggtagtgcgcggtgcgccggccatcggcatcagcgccgcatatggcctggtgctggccgcccgtgagcggatcgccgaaggcggtgactggcaggctgcgtgggaagaagactatgcattgttggccgatgcccgacccaccgcgtcgaacctgttctgggcgttgaagcgcatgcgtgatcgcctggatcgtgtgaaaaagcacgccgacccgctggcggtgctggaggcggaagccattgctatccatgaaagtgaccgcgaggccaacctgaccatggcccagctcggcgtcgagctgatccgcaagcaccagggcaacgcccaggccatcctcacccacggcaacgcgggagccctggcgaccggcggtgtcggtacggcactcggggtgattcgcgcggcttacctcgaaggcatggtcgagcaggtctacgccaatgaaacccggccctggctgcaaggttcgcggctgaccgcctgggagctggcgggcgagggcatcccggtgacggtgaatgccgactcggccggtgcgcatatcctcaagaccaaaggcgtgacctgggtgatcgtcggcgccgactgcattgccgccaacggtgatgtgatcagcaagatcggcacctaccagttggcggtgtgtgcgatgcaccacggtgtgcgtttcatggtggtggcgccgagttctaccctggacctgatgatggccactggcgatgacgttgccctggaagaacgtgatgccggtgagttgctggaagtcgccggccagcgcttcgcagcggatgtggcggccttcaatccggtgttcgacgtgaccccggctgacctgatcgatgtgatcgtgaccgaaaaaggcgtggtcgaacgaccggacaccgccaagttggccaaattgatgtgccgtaaacgcttgcattaagccaatttgccgccgaaatcgggcttggatccagctcagagcccctctcgtcgccctcaagcctgtcatccgtcaacttactatgctccatgcgcatcagggggataggtgcgtggcggcgattgtgataacatccggcggtttccagggctgccccgaggggcggcctataacgtgcagatccgtgtcataactcgttgatttgtcgtaagtcgttgtcaggcactctgccggcagcggcgagcttcgttcgtcccatatggatgtgacgaggtttcacccgaaaaaggaatcaggcttctcatgggcgaactggccaaagaaatcctcccggtcaatatcgaagacgagctgaaacagtcctacctcgactacgcgatgagcgtaattgtcggtcgggcactgcctgatgcgcgcgatggcttgaagcccgtgcaccggcgtgtgctgttcgcgatgagcgagctgggtaacgactggaacaagccgtacaagaaatctgcccgtgttgtcggtgacgtgatcggtaagtatcaccctcacggcgacactgcggtgtacgacaccatcgttcggatggcccagccgttttccctgcgctacctgctggtagacggccagggcaacttcggttcggtcgacggcgacaacgccgcggccatgcgatacaccgaagtgcgcatgaccaagctggcgcatgagctgctggccgacctgcataaagaaaccgtggactgggtgccgaactacgacggcaccgaaatgatcccggccgtcatgccgaccaagatccccaacctgctggtcaacggttccagcggtatcgccgtgggcatggcgaccaacatcccgccgcacaacctcggtgaagtcatcgacggttgcctggccctcatcgacaaccccgagctgaccgtcgatgagctgatgcaatacatccccggcccggactttccgaccgctgcgatcatcaacggtcgcgccggcatcatcgaagcctaccgtaccggtcgcggccgcatttacatgcgcgcccgctcgatcatcgaagacatcgacaaggtcggtggccgccagcagatcgtcatcaccgagctgccttaccagctgaacaaggcgcgcctgatcgagaagatcgccgagctggtcaaagagaagaagctcgaaggcatcaccgagctgcgcgacgagtccgacaaagacggtatgcgcgtggtgatcgagctgcgtcgtggcgaagtgcctgaggtgatcctcaacaacctctacgcccagacccagctgcaaagcgtgtttggtatcaacgtggttgcactgatcgatggccgcccgcgcatcctgaacctcaaggacctgctggaagccttcgtgcgtcaccgccgcgaagtggtcacccgccgtaccgtgttcgaactgcgcaaggcccgcgaacgcggccacatcctggaaggccaggcagttgcgctgtcgaacatcgacccggtgatcgccctgatcaaggcctcgccaaccccgtcggaagccaaagaggcgctgatcagcaccccttgggaatccagcgccgtggtggccatggttgaacgtgccggcgccgactcgtgccgtccggagaccctggacccgcaatacggtctgcgcgaaggcaagtacttcctgtcgccggaacaggcccaggccatcctggaactgcgcctgcaccgcctgaccggcctggagcacgagaagctgctggccgagtaccaggagatcctcaaccagatcggcgagttgatccgcatcctcagcagcgccgtgcgcctgatggaagtgatccgcgaagaactggaagtgatccgcgccgaatacggcgatgtgcgccgcaccgagattctcgatgcacgcctcgacctgaccctgggtgacatgatcccggaagaagagcgtgtagtgaccatctcccacggtggctacgccaagacccagccgctggctgcgtaccaggcccagcgtcgtggcggtaaaggcaagtcggctaccggcgtgaaggatgaggactacatcgcccacctgctggtcgccaacagccacaccacgctgctgctgttctccagcaagggcaaggtgtactggctcaagacctacgaaatcccggaagcgtcccgtgctgcccgtggtcgcccactggtcaacctgctgccgctggacagtgatgaatacatcaccaccatgctgccggtcgaggaatacaccgaaggtcacttcatcttcatggccaccgccaaaggcaccgtgaagaagaccccgctggaatccttcagccgccagcgcagcgtgggcctgatcgctctggagctggacgaaggcgacgtactgatctccgctgccatcaccgacggcgagcgtgaagtcatgctgttctccgacggcggtaaagtaacgcgcttcaaggaatccgacgtgcgcgccatgggccgtaccgcccgcggtgtgcgcggcatgcgcctgccagaagggcagaagctgatttcgatgctgatcccggaagaaggcagccagatcctcaccgcctccgagcgtggttatggcaagcgcaccgccatcagcgagttcccggagtacaagcgtggcggccagggcgtgatcgccatggtcagcaacgaccgcaacggccgtctggtcggcgcggtgcaggtgctcgacggcgaggaaatcatgctgatctccgaccagggcaccctggtacgtacccgtgtggctgaagtgtcgagcctgggccgtaacacccagggcgtgaccctgatcaagctggccaaggacgaaaaactggttggcctggagcgtgtccaggagccatcggaagtcgaaggcgaagagctggaaggtgaggagtttgagggcgaggtgatcgcagcaggcgataacaacgtcgacgagccaaccctcgacgctgccgcagacgaagaagaaccgcaggaataagcggacacacagggggcggatgaagattcgcccccttgttgtttgtcccttatgaaataacacgtcctttggctggacgcggtcaatgtgggagctggcttgcctgcgatggcagcgccgcggtatcactgcgctaccgaggtgcccctatcgcaggcaagccagctcccacaagggttcgctccagagaaaggttgttaccgaacatgattgcagccccaccagatcagagtgagattggatgtgagcaagagagcctataacttctgtgccggtcccgcggcgcttcctgaagcagtcctgcagcgtgcgcagggtgaactcctcgactggcatggaaaaggcctctctgtgatggaaatgagccatcgcagcgatgagttcgtgtctatcgccaccaaggccgagcaggacctgcgcgacttgctggacatcccatccaactacaaggtgctgttcctgcaaggtggcgccagccagcagttcgcccagatcccgctgaacctgctgccggaagacggcactgccgactatatcgacaccggtatctgggggcagaaggctattgaagaggcctcgcgttacggtcacgtcaatgtggcaggcaccgccaagccttacgactacttcgccattccgggtcagaacgagtggaagctgtcgagggacgctgcctacgtgcactacgtggccaacgaaaccattggcggcctggaattcgactgggtaccggaagtgggcgacgtgccgctggtgtgcgacatgtcctcggacatcctgtcgcgcccgatcgacgtgtccaagtacggcatgatctacgccggcgcccagaagaacatcggtccgagcggcatcctggtcaacatcatccgcgaagacctgctgggtcgtgcgcgatcgctgtgcccgaccatgctcaactacaaggtcgcggccgataacggctcgatgtacaacaccccgccggcgttcgcctggtacctgtccggcctggtgttcgagtggctgaaagagcagggcggtgtcgccgccatgggcaagctcaacgaagtgaagaagcgcaccctgtacgacttcatcgacgccagcggtctgtacagcaacccgatcaacctgaccgaccgctcgtggatgaacgtgccgttccgcctggctgacgaccgcctggacaagccattcctggccggtgccgacgaacgcggcctgctgaacctcaagggtcaccgctcggtgggtggcatgcgcgcctccatctacaacgccgtcgacatccacgcgatcaacgcgctggttgcctacatggcagagttcgaaaaggaacacggctaatgtctgagcaagaactcaaggccctgcgcgtacgcatcgacagcctggacgagaaagtcctggagctgatcagtgagcgtgcgcggtgcgcccaggaagtggcacgggtgaagatggcatccctggccgaaggcgaagtgccggtgttctaccgtcccgagcgtgaagcccaggtgctcaagcgcgtgatggagcgcaacaagggcccgttgggcaacgaggagatggcgcggttgttccgtgaaatcatgtcttcgtgcctggcgctggagcagccgctgaaagtggcgtacctcggcccggaaggcaccttcacccaggcggcggccatgaagcacttcggccacgccgtgatcagcaagccaatggcggccattgacgaagtgttccgtgaagtggcggccggtgcggtgaactttggcgtggttccggtggaaaactccaccgaaggcgcggtcaaccacacgctggacagcttcctcgaacacgacatggtgatctgcggcgaagtcgagctgcgcatccaccaccacctgctggtgggcgagaacaccaagactgacagcatcagccgcatctactcccacgcgcagtcgctggcccagtgccgcaaatggctggatgcgcattacccgaatgtcgagcgcgtggcggtctccagcaacgccgaagccgccaagcgggtcaagggtgagtggaactcggcggccatcgccggtgatatggcggcgggcctgtacggcctgacgcggctggccgagaaaatcgaggatcgcccggacaactccacgcgcttcctgatgatcggtagccaggaagtaccgccgaccggtgacgacaagacctcgatcatcgtgtccatgagcaacaagcctggcgcgctgcatgagctgctggtgccgttccacgacaacgggattgacctgacgcgcatcgagactcgtccttcgcgcagcggtaaatggacttacgtgttctttatcgacttcatcggccatcaccgcgacccactggtcaagggcgtgctcgagaaaatcagtcaggaagccgtggcactcaaggtgctgggctcttacccgaaagcggttttgtgaggcgttaacatgagtggcaacttcctcgccctggcgcagccgggcgtgcaacaactgtcgccttacgttccgggcaagcctgtggatgagctggcgcgtgagttgaacctggatccttcgaaaatcgtcaagctggcgagcaacgagaatccgcttggtcccagccccaaggtattggcagcgattcgtgaagagctggctgagctgacccggtatccggacggcaacggcttcgcgctcaagtcgctgctggcggaaaagtgccgggtcgagctgaaccaggtgaccctgggcaacggttccaacgacattcttgaactggtcggccgtgcctacctggcaccgggcttgaacgcggtgttcagcgagcacgcgtttgcggtctatccgatcgtgacccaggccgtcggtgccgatgcgcgcatcattccggcgaaagattggggtcacgacctgccagccatgctggcggccatcgacgcccagacccgcgtggtgttcatcgccaacccgaacaacccgaccggcacctggttcgacgcccaggcgctgaacgatttcctgcaagacgtgccggaacacgtgctggtggtgctggacgaggcctatatcgagtatgccgaaggcagcgacctgccggacggcctggatttcctggccgcgtacccgaacctgctggtgtcgcgcaccttctccaaggcctacggcctggcgtcgttgcgcgtgggctacggcttgtccagtgcggtggtcgccgatgtgctgaaccgcgtgcgccagccgttcaacgtcaacagcctggccctggcggcggcctgtgcggcggtgaaggatgcagagtatctggaagagggtcgccgcatcaacgaaagcggcatggtgcagttgcaggaaggcttccgcgaactgggcctgggctggattccgtccaagggcaactttatctgcgtcgatctcggccaggtggctgccccggtgttccaggggctgttgcgcgaaggcgtgatcgtgcgtccggtggccaactacgggatgccgaaccacctgcgcatcaccatcggtctgccggctgaaaacagccgcttcctggaggcgctggccaaggttctggctcgtggttgatgtcactgcattgcaacctgctgtgcctatgatcggtcgcctggtggtggtcggtctggggttgatcggtggctccttcgccaaaggcctgcgtgaaagcgggctgtgtggcgaagtggtcggtgtggacctggacccgcaatcgcgtcagttggcggtcgagttgggcgtggtggatcgctgtgaagcggacctagcgctcgcgtgccagggcgctgacgtgatccaactggccgtacctatcctggccatggagaaattgctcgccgtgttggcgggcatggacctgggccaggcgatcctcacggacgtcggcagtgccaagggcaatgtggtgcgcgcggcgcaacaggcgtttggtggcatgccgacgcgtttcgtgccgggccatccgattgctggttcggagcaaagcggggtggaggcgtcgaatgcgcagctgttccgtcgccacaaagtgatcctgacgccgcttgcgcaaaccgatccggcggcgctggcggtggtggatcgcctgtggcgcgagttgggtgcggacgtcgagcacatgcaggtcgagcgccatgacgaagtgctggccgcgaccagccatctgccgcatttgctcgcatttggcctggtggactcgctggccaagcgcaacgagaacctcgagattttccgttacgccgccggtggcttccgcgacttcacgcggattgccggcagcgacccggtgatgtggcacgacatcttcctcgccaatcgcgaagcggtgttgcgcaccctggacaccttccgcagcgacctcgacgccttgcgcgatgcggtcgacgccggggatggccatcagttattgggcgtgtttacccgtgcgcgggtggcgcgtgagcatttcagcaagatcctggcgcgccgggcctacatggaaaccgctgtgaacgctgatgagctgaccttcctcgccgaacccggtggccgcttgagcgggcgcattcgggtgccgggcgacaagtcgatctcccatcggtcgatcatgttgggttcattggctgaaggcgtgactgaggttgagggtttcctcgaaggcgaggacgcgctggcaactttgcaggcgtttcgcgacatgggcgtggtgattgaagggccgcaccatgggcgcgtgaccatccacggcgtgggtttgcatggcttgaagccggcgccggggccgatctatctcggtaactcgggcacctccatgcgtctgctgtccgggttgctggctgcgcagagcttcgacagcgtgctgacgggcgatgcttccctgtccaagcgcccgatgagtcgcgtggccaagccgctgcgggaaatgggcgcggtgatcgagaccggcccggaggggcgtccgccgctgactatccggggtggtcaggtgctcaaaggtttcgattattcgatgccgatggccagtgcgcaggttaaatcctgcctgttgctggccgggctttacgccgagggcaagacctcggtgaccgagcctgcgccgacccgtgatcataccgagcgcatgttgcgcggttttggttatccggttgatgtggtgggggccaaggcgtcggttgagtctggccatgcgctggttgcgacgcatattgaagtgccgggggatatttcctcgtcggcgtttttcctggtggcggcttcgattgccgaaggctccgagttgttgctggaacatgtgggcgtcaacccgacccgcaccggcgtgatcgacattctgcggctgatgggggcggacattaccctggaaaatccgcgtgaagtgggcggcgaaccggttgctgatctgcgcgtacgtgccgcgacgttgaaaggtattgaaatccccgaggcgctggtgcctttggcgatcgacgagttcccggtgctgttcgtcgcggcggcctgtgccgaagggcggaccgtgttgcgcggcgccgaagagctgcgcgtgaaggagtccgaccgtatccaggtcatggccgatggtctgctggcactgggcgtgaagtgtgaaccgacgcctgatgggattatcattgacggtggcctgatgggcggtggtgaagtgcatgcccatggcgatcaccggattgccatggcattcagcgtggcttccctgcgggcggcggcgccgattcgtatccgtgactgcgccaatgttgctacgtcttttccgaactttcttacactgtgtgcccaagtcggcatccgtgttgcccaagaggctcaattgtgaatatcaaagcaccggtgattaccatcgacgggccaagtggctcgggcaaaggcacgatcgccggcatcctggccaagcgcctgggctggtgcctgctggattccggcgcgctgtaccgcctgctggcattcgccgcacgcaaccatggcgtcgacctgaccaacgaagaatccctgaagctgctggcggcgcaccttgatgtgcagtttgttggcgcgacggaaggtcatccccagcgcataatccttgaaggggatgatgtgaccgatgatctgcgcaatgagcaagtcggctcctgggcctcccaggttgccgcactgccagcggtgcgggacgcattgttgcagcgccagcgggctttccaggagccaccgggcctggtggccgatggccgtgacatgggaaccgtggtgtttcccgaggcgccattgaagattttcctgaccgccagcgccgaggagcgggctcgccgccgctacttgcagttgaagggcaaagtcgatggtgttagtctgtcgagtctgctagatgagatccgtgcacgcgatgagcgtgatacccagcgcgcagtagccccgctcaagccggcggctgatgccatacagctggattccacggagttgtccatcgagcaggtgctggaacgcatcttgagcgagatcgccattcgcgatatcgccgggtgaccaagaaggctgcaggggaccagtcatagtcctgcggtgcttcttttaattgaaactgacccacaccgtctggggtgtggagatgggcgtattcttcgcccttatcaacaggaattaaaatgagcgaaagctttgcggaactctttgaagaaagcctaaaaaccctgaaccttcaggcaggctccatcatcaccggtgttatcgttgatatcgattaccaagctcgctgggtaaccgttcacgctggtctgaagtctgaagctctgatcccgctggaacagttctacaacgatgctggtgatctgacaatcaatgtcggtgacgaagttcacgttgctctggactcggttgaagacggtttcggtgaaaccaagctgtcccgtgaaaaagccaagcgcgctgaatgctggattgttctcgaagcagccttcgcagctgaagaagtggtcaagggcgttatcaacggtaaggttaaaggcggcttcactgtcgacgttaacggcatccgtgcgttcctgccaggttctttggtcgacgttcgtccagtgcgcgacaccacgcacctggaaggcaaagaactcgaattcaaggtcatcaagctcgaccagaagcgcaacaacgttgtcgtttcccgtcgcagcgtcctggaagcagagaactccgccgagcgtgaagctctgctggaatccctgcaggaaggccaacaagtcaaaggtatcgtcaaaaacctcaccgactacggcgcattcgtcgacctgggtggcgtggatggcctgctgcacattaccgacatggcttggaagcgtatcaagcatccttccgaaatcgtcaacgttggcgacgagatcgatgtcaaggttctgaaatacgatcgcgagcgcaaccgtgtttccctgggcctgaagcaactgggtgaagatccatgggttgctatcaaagcccgttacccagaaagcactcgcgttaccgcgcgtgttaccaacctgaccgactacggctgcttcgctgagctggaagaaggcgtggaaggcctggtacacgtttccgaaatggactggaccaacaagaacatccacccttcgaaagtcgtacaagtcggcgacgaagtggaagttatggttctggacatcgacgaagagcgtcgtcgtatctccctgggcatcaagcagtgcaaatctaacccatgggaagatttctctggccagttcaacaagggcgataaaatctccggcaccatcaagtcgatcaccgatttcggtatcttcattggtctggacggcggcatcgacggcctggttcacctgtccgacatctcctggaacgaagtgggcgaagaagctgttcgtcgtttcaagaagggcgacgagctggacaccgttatcctgtcggttgacccagagcgcgagcgtatctccctgggtatcaagcaactggaaagcgacccgttctctgaatacgttcaggacaacgacaaaggcgcaatcgttaaaggcatcgtgaaggaagttgacgctaaaggcgccatcatcactctggccgacgatatcgaagcgactctgaaagcctccgaaatcagccgtgaccgcgttgaagacgcgcgtaacgttctgaaagaaggccaggaagtagaagccaagatcatcagcgttgaccgcaagagccgtgtaatccagctctccatcaagtcgaaagacgatgctgaagagaaagaagccatccagagcttgaaagacaagccttcggatagcatcgctgctggtcctaccactctgggcgacctgttgcgtgcacaaatggaaaaacagaactaagttctgtcagaccataaaaaagggcgacttcggtcgcccttttttgtgcctgaaattcgttgaatcaacaccgagaaccaaggcgtatagcccagtgtcagaactgactatagtcttaagttaaaagcggttcttgtgttgtggcttcagtaaggatttgaatgaacaggcttatcgtagtgctcgcattggtaatgcttgctggttgctcggccaccagcgccaagacccacgccaaacgcggtgtgagtggtatcgaggtagattgctctggcctcggcaacagctggagcaagtgcgaaaaacgcgcggctcgagagtgcaagatgcagggctacaaggtcatcacccgatccagcgatgccagcgacgaagagggtgactatctgttcggttggaaccctgccggggcagtaacccgcactatgctggtcatctgtaattgaggtcggaatacgcctatagccggttgccatctatcctgcggataagttgttcggtgggctgttcaaattcatcaagtcatgctaaaatcttcgaagcgcttttcctagctgcttgaaaaagaagggaaaaatatgacgaagtcggagttgatcgaacgaattgtcacccatcaagggctgctctcatccaaggatgtcgagctggctatcaagaccatgcttgagcaaatgtcccagtgcctggcgaccggggatcggattgagatccgtgggtttgggagcttttcgcttcactatcgcgcaccgcgtgtgggtcgtaatccaaaaaccggccagtccgtcagcctggacggtaagttcgtacctcacttcaagccgggtaaggaattgcgtgatcgggtgaacgaagacgaggaagagggcgtctgatcgactttcaggagaacgttatgctaaaagccaggcgctttgtatcggttgtagctgttttgtttttcgcgctcattgtcgtgacttttgtgttggaaaatcagcaaagtacaaagctgtcatttttcggctggtctaccgttgaactgcctgtttcagtttttacgacgttggctttggtcgtgggaatgatcattgggccagtgctggggttgatagtgggtcgtaagatggctcgacaaaaggcttgatgtcttttcctgcagcatcctgttttctttagcggccgcagcctgagcaggatttgagacgtttatcctgtcatgtatgccatgccctgctggtctagtgaaaaacttgcgcatttgtctgcattaatgctctcgaaaagtcggtctgcgttattctcttgcaccgctcggggcttgcgccccttcccctcaagccgctgccaaggcgccttcttacgcgacatgcatccatgttcgcttttgactttaaggatgcaggccttaaaatggccatcaattttcatccccttcatctttaactgcaccacacaaagcttatttttcgggctgtttgctaacgagcttcgacgttttcctagaacctcttcaccgttgagcattccggggcggcatgttggctttgttggtctgcaggcattgaggtgattggccgactagaagcttgtcgtgctgtgcgcgttgctttaggacttactatgttcagcggaaaaacgcttcttatcaccggtggtaccggttcattcggcaacgccgtcctcaagcgcttcctcgacagtgatattgcagaaatccgcatcttcagccgcgatgagaagaagcaggatgacatgcgcaagcgctatgccgacaccaagctcaagttctatataggcgatgtgcgcgactatcaaagtgtgctcaatgccacgcgtggtgtggactacattttccatgcggccgcactgaagcaggtgccttcctgtgagtttcatcccatggaagcggtcaagaccaacgttatcggcactgagaatgtcctggaagccgctatccagaacgcggtcaagcgagtggtttgcctgagcaccgacaaggctgtctaccctatcaacgccatgggtatctccaaggcgatgatggaaaaggtcatggttgccaaatcccgcaacgtagatgatgccaagaccgttatctgcggtactcgctacggtaacgtcatggcttcgagggggtctgtcattcccctgttcatcgagcagattcgtgcaggtaacgcattgacgttgaccgacccgagtatgactcgcttcatgatgacgctggccgatgctgtggacttggtgctgtatgcttttgagcacggtcgcaacggtgatctttttgttcagaaggcgcctgccgcgacagtcgagaccttggccaaggcactgaccgcaatggtcggccggcctgagcaccctatccaggtcatcggtactcgccatggggaaaagctttttgaagcgttgttgagccgtgaagaaatggcctgcgctgaagacaagggtgattactaccggattccccccgatctgcgtgacttgaactattcaaaatttgtcgagcagggtgaagagaaaatctcccgtacggaagactataactcccataacactgaacggttggatgtggccggcatgcaacggcttctgctcaagcttgaattcatgcaagcgatccagcgtggcgaactcgctacgccggaggaataattgatgaaggtactgatcaccggggccaacggttttgtcggcaagaacctgattgcgcatttgactgagcgcagtgatgtcgaggttgtcgtctttacccgtgacaacagcatcgcccaactgccagcgttggttgccgaggtcgattttgtgttccatctggcgggggtcaaccggccccaatcgtccgatgagttcaaggtgggcaatactgacctgactgtggccctgtgcgacgcgatcaaggcaagtggcaagctcactcctgtgctctacacctcgtcgacccaggctgaccgtgacaatccctacggtgccagcaagctggctgccgagcaggcattgcacgacctgcaggcgagccatggttccagggttcatgtcctgcgcctgcctaatgtgtttggcaagtgggcgcgacctgattacaactccgccgtggcgactttctgccataacatcacccgaggcctgccgatccaggtcaatgatcgacaagcgatggttaacttggtctacatcgacgacgtggtcgagtgttttatccgggtaatggattcgggtttacctcatggcgcggcggctcaggtgagcccaatttacagcattgctgtcggggaactggccgatcaactgcatgcgtttcgcgacagtcgcgaaacgttgatcagcgaagctgttggcacgggcctggtgcgagcactctactcgacctatgtgagctacttgcccgtcgagcaattcacttatgacgttccgaaatacggtgacccgcgcggcgtttttgtcgaaatgctgaagaccaaggacagtgggcagttttcctatttcactgcgcatcccggcatcacacgtggtgggcattatcatcacagcaagaccgagaagtttctggtaatcaaaggcaaggcctgcttccgttttcgccatatcgtatcgggtgagttccatgagttgttcactcaaggtgaacagcctcgggtggtggagacagtgcctggttggactcatgacattaccaatgtcggcgaagacgagatgatcgtcatgctctgggccaacgaggtttttgatcgtgagcggccagacacctttgcgatgccggtgggtactcaagcctgagcatgagcgcatcaggcaatgcatggcgcgaacagctccgatgccaatgattctggaagagtgttgaaatgaaaaagctgaaagttgtcacagtcgttgggactcgtcccgaaatcattcgcttgtcgcgagtgattgccaagctggatgaacactgtgaacacgtcctggtgcataccggccagaactacgattacgaattgaacgagatttttttccaggacctcggtattcgtaagcctgaccattttctcaatgcagcgggcgcgagtggtgcgcaaacgatcggcaatgtgatcattgcggtggaccaggtgctggaggaggtgcagccagaagcccttctgattctcggtgataccaacagctgcatggcggtgattccagccaaacgccgtaaaatcccgacattccacatggaagccggcaaccgctgtttcgacatgcgtgtgcctgaagagatcaatcgccgcatcgttgatcacaccgcagacatcaacctgacctatagcagcatcgcacgtgactacctgctgagcgaaggattgccgccggatcgggtgatcaagaccggtagccctatgtttgaagtgcttaaccattaccgtgatggtatcgaagcctctgaagtgctcgatcgcctcagtcttgaggcgggcaagtttttcgtggtgagtgcccatcgcgaagagaacattgattccgacaaaaacttcctcaagctggtcggcgtgttgaacaccgttgctgcccagtatgacctgccggtgatcgtgaccacacaccctcgtacgcaaaagcgtgtcgatgcgatgggcgtaacctttcacaagaatgtgcaattgctcaagccgctggggttcaaggattacaacaagctgcaactgacggccaaggccgtactgtccgacagcggcaccatcaacgaagagtcatcgatcctgaatttccctgcactgaatctgcgtgaggcccatgaacgaccggaagggatggaggaggcggcggtcatgatggtcggcctggaggttgagcgcgccctgcagggcttgcagctcctggaaagccaggccgctggggcggaacggacgttgcgcttggttgccgattacagcatgccaaatgttgccgaaaaggttgtacggatcatccatagctaccgtgactacgtcatgcgcactgtatggaagcaatattgattggacagcctctccccggaaaaaccactgaagattctggtggtcacccagtatttctggcccgaaaacatgcgtatcaacaacatggtcgaaggctttgtcgccaaaggtcatgaggtgaccgtcctcacgggcgtgcccaactatccggaagggcaagtctttgccgatttccggcgtgaccctgcgcagttttccaattatcggggagcgcgagtgatcagggtgccgatgctggcgcgaggcaagagcaatttcagactggccatgaattacctctcgtttttcagcagtgcctcaatcattggcagttacaagctgcgtggtcaggcgttcgactccatctttgtgtatggcgtgtcgcctatcatgggggcgatcccggcgctgttgcttgggcgcttgaaaagggctccggtacttatatgggtgctggatctttggccggaaagcctcagggcggttggggttatagaaaacccgaagttgcttggactggttggcaaggtggtgtcctggatctacaaccgcactgattacctgttgttgcagtcacgttcgttcgacgagaacgtcaaggagtactgcacacgtgcaattgatgcagaccgactggtgtatttccctagctgggctgaggatgatttttccgcagagctgcaggggccttcggagttgctgcagcgtgacgatgctgtatttacaatccttttcgccggtaacatcggcgatgctcaggattttccagccatcatggcggcagtcaaggctgtcgagaccgatctgcctgtgcgctgggtgattgtgggggatggtcgggcaagccaatggctgaccgagcatgtggcgcaaaaccgcatggacaacgtgctactgcttggcagacatcccttggagaagatgcctgcgttgttcgccgtcgcggacgctttgctggtttcgttgaggacaaatgacgttttcgagaaaaccattccaggcaaagttcaggcttacctggcttctgggaaacctgtaatcgccatgatcgatggtgaagcggccaacgttgttgaaggatcgggtgcgggcatggtgtgtcgttctggcgatgcccaggggttggcgcgtatcgttcgcaccatgggcgtcttacccaagtccgagcttgagagcatgggcctgttgggcaggcgttactaccttgagcatttttccaaggacaccttgttcgatcgtcttgaggcgctatttagaaaagcgaccttgaggcgtaaccaacaatgaccagaaccctttgcccgtctctgtttcaggaattgtttgcgaaatgaccctctggttcgtgtttgccgcagtactcctcgtatcacttttgttgacctgggtactgcgccgctatgctttgtcgcgtagcttgatggacattcccaatggtcgcagctcgcactcggttcccacgccacgaggaggcggggtcgcaatcgtgctgactttcctggtggcgttggtgctcgttgcgctcgctggctgggtcagttggaatgcagcatggccattgctgggggcgggcgcattgatcgccgtggttggctttctcgatgatcacggccatatcgccgcacgttggcgcctgttggcccatttcgccgcagccatttgggcgttatgttggatcggagggctgcccaccatcagtctggccggggttgaattggaccttgggtggttcggtcacgtgctggcggctttgtacctggtctggatgttgaacttgtacaacttcatggatggtatcgacggcattgccagcatcgaggccgtctgcgcctgttcgggagcgtgcctggtgtactggctgacagggcatgaaagtctcatgcttgcgccgatgttactggcagtcgccgtgcttggattcttgtactggaactttcctcccgcgcgcattttcatgggcgatgcgggtagcggcttcctcggtgtcgtaatcggtgtgttgtctctgcaggcggcctgggcggcccctcagatgctgtgggtctggctgattttgctgggtgtgttcgtggttgatgccacctttaccttggggcgacgcctgttgcgcggggataaggtctatgaagcgcatcgcagtcatgcttatcagtatgcctcgcgccaggccgggcgccacttgccggtgacgctgacggtgatggcgatcaatctattgtggctgctgcccatcgctcttttcgttggccttggttttgacggtgttcttgggctggtggtggcgtatgttccgcttgtagggctggcgatcaagtttcacgcgggcgagttggaaaaagtgtgatcattggttgacgctggtgtttgaaaaggttgctgcacacgtacgtgactgccattttttgctggcagcgctagggactgaggtataaaaagggtttatggatagtctacgtgcccgattggtgggcttgccgcgcaggcaaaaacgtttcttgcaagtagtgaccgacatcgtcctggtgtggggagcactgtggctggcatttgtcgttcgcctggggtttgatgatcttaacaaccccttcgtcgtgcatttgtggttgtttctcagcgcgccggtaatcgctatcccgttgtttatccactttggcatgtaccgtgcggtcatgcgttattttggcaatgatgcgctgattgcaatcatcaaggccgtgagcctctctgcattattgctggcgctggtggtgtacctgtacagcaatcaccagacggtggtgccgcgctcgatcgtattcaactattggtggttgagcatggtcatcattggcggcctgcgcctggccatgcgtcagtactttcaaggggactggtttactgcggcgcaacacgtgccgttcaccaatcgtgatgatggcttgaccaaggtcgctatctacggtgccggggccgcaggtaatcaattggtggcagccttgcggctggggcgggtaatgcggcctgtggcattcatcgatgatgacagcggcatctccgatcggatcatctcggggttgaaggtgtacaagcccaagcgtatccagcagatgatcaatgagactggcgcggaagagctattactggccatcccttcatccacacgggctcgtcgccgagagatactcggttatctggagggatacccgctgcatgtgcgtagtgttcccggtttcatggatctggctagcgggcgcgtcaaggtcgatgatatccaggaagtcgatattgccgacctgctgggtagggaccctgtacctgcgcagcccgaactgctggagcgatgcatcaagaatcgcgtggtactggtttccggcgcgggcggttcgatcgggtcggagctttgccggcagatccttacgctggaacccaccagcctattgttgttcgaccacagtgagtacaacctctactgcatcctgtccgaacttgaacagcgcgttcaatcagaattgttgaatgtgacgttgttacccatcctcggttcggtgcgccatccggacaaactgctggatgtcatgaatacctggtcggtcgacacggtctaccatgcggcggcctataagcatgtgcccatggtggagcacaacattgccgaaggcattcttaataacgtgatcggtactctcaataccgcgcaggcagcgttgcaggcaggtgtcgagaactttgtgctcatttcaaccgacaaggcggtgcggccaaccaacgtcatgggcagcaccaaacggctggcggagcttgtgttgcaagcgttgagcaaggaattggcaccgacgttgtttggtgatgcgtcgaatatctcgcgcgtcaacaaaacccgtttcaccatggttcgctttggcaacgtactgggctcttcaggttcggttatcccgctgtttcataagcagatccaggcgggaggccctttgacggtgactcatccgaagataacccgctatttcatgacgattcccgaggcggcgcaactggttatccaggcgggttcgatggggcagggcggcgacgttttcgtgctggatatgggtgagcctgtgaagattgtcgagcttgctgaaaagatggttcatctctcgggcttgagtatccgctccgagaaaaacccgcacggagatatcctgattaatttcagtgggctgcgtccgggtgaaaagctgtatgaggagttgttgattggcgacaatgtagcggctactcgtcatccaatgattatgcgagctaatgaagagcttctggggtgggaagtactcaaggccaggttgcacgggttattggcggctgtcgaggagggcgattttgcgctcgtcaggcaactcttgaaagaaaccgtcagtggctatagcccggaaggtgagatcgtcgactggatgcacattcagcgacaccgtgaagtctgatcatctggtggacgctctgatgggcctatttggaggcccatcaggtaaaacttaagttaaagcttccagagttttttgttcagtctgaagctcgataggtagacgaacagtctcgatatgttcatgaacctgttagggcctacagtgtaaagaaccacctttagcaacgagttgatgatctgaagctttccagagtgattttgtgcgtcaccaaatcctgccggtttgtatggcccgcctttttcgaacaaatagttcttcttggcaaattggtagacagggccgctcgcatcgaacggctcatgctcggcaggcagttcatccagtacggcggcgtaggcccttctcagcgtgggcgaaatgtatttcccatcgctcatataatcaaaggcataggctgcgttggaagggaaggctgaaaagttggacagccgttccttgtaatagaagctgacctccaacagatcttcacgtttttcttctcttcccgcaaatgctcgtttgctcaagcgttccggattcttctcgtcaaacgaactgaagtggaagaaaaccagcgggaactctccatttaccgtatagccaccctggccgtcaggggcgagggtgcgctcatggctattccaaaaagccatgttgtagccaagattgaacgatacgtgcagggtcgggaagaagcagggggcgatgctgacccacttctggtcggtggagaggccaaactgagtttcgaaatagcaatgttccagacagcgttcattccaccactggagaaagcgtatgccttctgacgtgtttgaaactgcgtagaagcccagattgaaggagccaaagcgcagcatcccgacatcaccctcgacatgaggcgtgacgtagtggggcgttagaatgatgtcacgcgtaccgagttcgtcccataggccatcgaggcggctgaaaacgcacgtgtcggggtcgaggaagataaccttctcgtgttgctcaagcagctgcaaagtgatccagggcttgagactggtactgaactccacgatgtcgtatttaaaggcgtagtgctggacatttggcaatccgatctcttcaacccaatggaactctgccaggtgggtggggagatccatctcgaccttgcgatcaaaaatatagatcttcagtttaggctgaccgaatttaaccagcgactcggccagcaccaacgctttggacaagtaagccaagttgcacacagtaaaaatggctgagcgctcgacggtcatgcctttttcatcagtcacgtttaaatattcctaatgtattgattactctgacgaggatctgagacgtgcagtagagggtcagtaatcttgtgattctgagcgcgaagctgaactgacagctcgcgagcgcagaaaaaataagtttcaggttcgaagataccgtgtcttttattctggaccatgaatacgcccgcattgaatacgtacggccagcaattcggtagcgactgtcagcctgctcggtcacatgatcaaagccaggtgtggcgccacagacgccgattcgatagcctttattcaatgaatccaggcacagcttataatccacgctgtcgacaaagtagctgcaatccatccagcctagagcgttgagtttatccagaaaataaagactgccactgttgatcagtaggggcacatcgcgtacagacgcgcttccatcggccttgaaagcgatcgcgctgaacgcattgtaagcgtcgaggtggtcggtatagtttttttcgacatgggccagtgtttcttcgttgaaccccgtgtcctgatcaaaaaacagaagtgccgagtggccctgttgataggcgttggcgcataccgttgaaataccgatgcccagccccagatttttaccgcaggtaaaatagtggatctgcggatgatgttcggcgaatgcccgcacgctggcattatcaggtgaattgtcgaatacatagacttcaaacccgtttgccgaagtcaattcaagcctgtgcagtaattcaacgccggcgtgatagacaacaatccctacagcaatcttacgtgtcatgccatacctttgatatgtggagccgcccgtacccggtcgtgtttatacacttaaccatttgctctctttatcgctccatactttcacaaccctggcagggcagcccacggcaatgacgttgcctgggatatctttggcaacaacgctattggcaccgatgatcgagccactgccaatggaggtgttcggcaatatgacgacattgtccccgatccacaccttgtcgccaatggtcacagggccgctgctggacagctttcgttcgaacggtgtttcgtaggggctggactggtcctcccccgagtacgcgccgtgggagtggtccgtgatatggatcttgctgcccatcaacacatcgttgccgatggtgaccttgttacaacaggcgatatgcaagtggtcgctggcagagaaattttcgccgatttcgatacggggttgataggtgaacgcaaggtattgaggaatggcgtgtagccagagtccctcacccaccctgaagttgttacccagtgcgatattttccagtccaaataccttgggcgcacggccgaggtaggcgcgcctgcctggacccggaatcgtcctgaggtgaatgagcgcgcgccacaccaagagaaatctccccgcaagtagcgggataatgaacaggtggtgttgttttaatttctttagaatatatgacaccgcgtttactcgtacttgggtgttaacggatcttggttggctctggactttattgatgtccggatccaggcggctgattgcgtgtaaaccgaagataagtgtcggccatggctttaagcagggggcggggggtaagtgaaataacagcgacaatcaggagtgggtagtcgatggacaagcgtaaggcatgcttgaattgcctgtacgtcgaatagctcaagagcccacgaacgcgcagagataccattccccttaccgaaaaagcccccgacacggcgccgaaactacggcatgcagaaagtttgctcttcagtgcatagctcgatggcagtgagaaaataaagttcacccatttttccaccccaacttcaaatatttttggcgtatgtgcccagcctttcttttgcagggttgggctctctagtgaagtaatagatatgtctcgctcccatcggataactgcattgccacgcgccgcatgttccaatatgaccccggtctgcatgtagtaagaaccgatgtagcggttgaagtccgctgtggcgatcagttctttattataaatcaggcagctcatgcagctcattattccggctagctcggtcaacaaagcatccgggcaactatagtcttggctggctgttgtgtttttatcgatgagattgacgactattgcgctatagctatctgagctttcgattagcttgagtacggacacgatacctttttcggggatttgcgacgtatcccccaagagccacacgtattgggtgtccgcagccttcagtgctttctcgaaattggcctcaggacccagtgtggtcgcgttacgcaggctatgaataaagccgtattctttttgccacttcgcgatcacgtcctgtgtgttatcggtcgaggcattgtctgatatgaaaatttgtaggttgtggctgcgggctagcggaacgtgtaccgacagggatttatctagaaagtccgctcgattgtaggacggaatgacgattgagagagaggggttgccaactggattcatgcgtgcgatctcttgaagtttttaaatatccagtacacccagggcgtcaccaagcaaagcgcgctaaagaaaccgagaaataggtaatcgaagggtagataaatggagataaccagcgtagttgttgctacatacacgccttgtaccacggacgcggtaaccagcggctcttgtttgtgagcccgcatgtagacagccatcgagttgatccataactggatcaaccagccaaatccaaccaatgccaaggcgacatgtgacagcaggcgatttgcgatcggcaggtaatccttgaggagttcgatgcctgtaaacagagttgccaagcccagtatgtaagtcaccgtggcgagcaggagggcgcgtttgaaggtggtgtccagcgctgggtaatcttgctgtgcaacatacatgttcatcttgggtgtgttgattgaaacccagatgtttgcgatgctgaaaagcgccatgcatatcgccatcgatagacccacttgtccagcctctactgttccgtaaaagtggaatgccaaaggggtaaagatagacagaataaaataaccacttatccagctgacagcaaaccgccacatcagtggcatgatttctggcgcccacgcgtgttgggcatgtttaccggcggtataaagctgttgaagcatttttttatagcggcagccgatcaggaccagcccggtcgtcgctccggctagcagggctattgcaagggcgtaaagctcttccccgcagaacagcagaagtgcggtcacggtgactgtgcttacgctgatgtagaaccggattttttgcacatctccgacgctatcgcacccttcgataaacgacagtaacatgctgttcaggaagaccaatacggacgctgcaccatagatgagccagggaaattgccagttgatagctgaacccttgctattcaggaaaacatacccggcccctaataccagggggaaaatcaccatggccattgcacttgaccacttcaaggcaaatttgccaagggttgccaagcggatcatgtgcttggtatcaccggtaagcgttttatcagggttgaacttcaggtgcgcgaattcgtgggatgaaaacagtaaaagtattgacgaaaaacccatgtcagcgaacacagccagggctgccaggctaataaaggtgtaccagtagccttgggcttctgcggagaggtaaagggggactaacagcagtagcagagggccggaaaacaatctccagagctgattgatggcggagtgtcggacatcgtagctcagtaacgttttgagcagcatatttttcacggctgatggcacattctatttttcaacttttgagaaggctggagttttatcaggggcgctctacatacatacgcgctgcatgtaagcgtgcccccaaactgagtggctgcaggttactatttcccggccagctcttttgcgacctctatgatcaggctttcctggccagcaactgccttgcgttcacccagtcggaaaaacacgtcccttgggtctacaccaaattctgcggccgctctggccacgggtttggcgaagccggaaaatactccagcaagaccgctcacgattgagactggggaaatggagggtgcgataaaccccagttccttttctgccatcgtggcagcgtctaggattttgaatagatcaatcccagtgtcatatccgagtttgtgcaacacccctaccagcacttcaagctgtgtattgccggcgccagcgccaaatccacggatggtgccatcgagaattgtcgcgccttcattgaccgctgttacggagttgattacagccattccaaggttattgtggccgtggaagccaactgggatggacaggccatttaccaaagtgctgatgcgagctttgacatcatccaccatctgagcgcccgcagagtccatgatgacaatagcctgggctccataggactccattttcctggcctcttcaagcagcactgctgggctggccatatgcgtcatcatcaggatgccccatgcttccttgcctgactctcggatatagccaatgtggcgctgggtgacatcagcctcggtgcagtgcgcggcaatccggaatacgtcgacacccagttcgactgccttgctcaggtctttcttgatggtgcagaagcccgggataacatggattgccaatcgagtgttgctcagatgctcgcgggagattctgagaatttcctggtcactgagccggctctctccaaccagcatcgacgagccaccgaggccattgccatggccgacctcgataatgggtacattcgctacctccgctgccttgcaataagcgacgaacgcttcggctcccaatttatgccctaccgcatggttaccatcacgcaatgttggatcggtaatgagaatttgcttaggcatgcaggttttccttggcgtgaaaggaggtcgcgatcatttctgcgacagcaatagcggcacagttgatgatgtccaggttgccggcatactgcggcaggtaatcgccgttacccacgacctttatagtcgtcagtactcgatctccttcaaccgttggtgggacgatcagcgcataaccgggaacatactcctgcagctttgcgaccattgcgtctaccgaatgacggatagcaggaatatcagggttggtgatcttggcgtagatggtcgtttgcatgtcgatcggcgggttggccgggttcaggatcagtatcgccttcgtccgctgtgctcccgagaagcgcattagcgcatcctcggtggtctctatgtactcatcaagattggcccgagtggccggccccgcactgagtgatgcaatgctggaaacaacttcgatgtattcaacattggcatgaacggcagcaatcgcactggcgatgggaatggatgactgcccgccgcaggtaatcatattgatgttctgcgtatctccgcctacacattccctagcgttgatggcggggatgcagaacacccccagctttgccggtgtcatgtcgatgactgtctttccgagcttgcgcaatgcatcccagtgctcaacatgtgcatgagcggaggttgcatcaaaaaccaggtcgcatacatcaggcgacgagaggatcgcaccaataccctgatcggatgttggaatgcctagctcggcagctcttttcattcctgccgacgagtagttacgcccggcgaaaagcgtacatacaagatgctgagagcgcattatcttcacgagcaggtcggtaccaatattgcccgaaccgataatagctactttcagtacttttttagtgaccatcacatatatccaaggaagcgcagaatcaaagcaagccgttattttactcgtagctcgttgatctcaagcgcgtgctgtgtttcgtgcaaaaagaagaagttggtttctagcgtctggtcatccatcaggccaaatgcacggagatttccctccgcgtcagcggtgaagcattggtagcccagtccctgaaaaagctcgatgatttggttggggtggtagtcaaattttgctgcccattttcgcagcatttccgtgaatacaataggcttgtcctgggccaacagtttcagcgcaccctggaagacaaaaagctcggccccctcgacgtcacatttgataaagtcgaccttgggcagacccagtcgtgttgacgtgtcgtcaagtaccttgacatcgcaggtaatctttttgacgtcggagcgcccgctcaagttggctgaagaggcatttcccgagcctcctgggtagaaatagaactctagggttttctcttccgaagagaatccaaaattgaaggtcttgatattgtccagctcgttgatgcgcacgttttcttggagcgccagatacgtggaatcaatgggttcaaacgcgtagacattgacgcctgggttctttttggcgatgttgagggcataccatcccatgtttgcgccaatatccaatacgcaggcatttggcttgaccagtttcatgatcatgtttgaatctgtcagctcataatcgccaaagttgagaatctcaaccggcgcaacacgcttgtcaaactcggggcatacaatttttataccattgtcgcgtgaggtcatgaccaccttgccatcggtgatttctatgcgggcaacgtttgtttcttgcaaccatgatgcataggaaaagagcttgctatggaagtcactgtacattccatctatatagtcaggtttgctcaacacttggttttcaaagcactgacgcatctcttccatgttcttcatgtgtaactctcaatggttttcttgaagccctcacggacaggcgtccgggggagccagccgagcttttcgactttagtgatatctgggcagtttctgacaattgggcttactaagtacgtactgtcattttcgcggggagcaagcaaaacgctcaattttttttcggggtatagctctaccagtatttcggccagctctccaatactgatttctcccgcggggttaccaatattgtatgcctcgccgtgggtgccgttgagcaataccgtccagaagcctgctaccgcgtcggctgcatagcagaaggcacgtctcgcagtaccatcgcttttcatggtaatgggctgattattcaggatattggccacaaaatcagcataaacccttccgtcatttaatagcatgtgagggccgtaggtgtgaaagggcctgacgatggtggccggtacgccagcttggtggtgccaactgacgcacatgttttcacccattcgcttgctttccgcgtagcaagcacggaccgaggtcgggtcgacaaacccgaagtctccctccaaggtcggtaccctatcagtctgtccgtacacctcgccgctgctgaagaagagaaaccccttggatttgctcagggctgcaagtttcagcagtgcagcggtccctagtgtgttggcactcaaggtgccaattggatcggtcgaataatacttggggctggcctgactggcggcatgaatgatgtagtcagggcgcacgtcgaattccaaaggattactgacgtcttgttctatgcaaactaagtccgatctgcctaacacatgcgcaaatctgctctcgaagcgctgccggctacgaaccagggcaaagatctggatctccaacccttgtgtttcgttgagaaacaacagcgtttctaccatgtaggcggcgagaaaaccggaggcacccgtaatgagtaccttctgccccctcagacgatgccaaggtaacgggtactgggtcgtaatcgctagcagatcgctcgcgacgatggcattgcgcaagatcttttccatgggagggcttacgcgcccagcgtcttggatttttcatgcatgcccttgagcatggcactctccagttgatcacgtggaatcagtggcgagagatcttccaggggtggagagaccagcgaaccgtcttctttcactatcacggaaagtttcggtgagaacagttgctctgggtgcataaacacctcgcagataatcggtccggtcgcggcctgcactttttccaatgccgggtccacgtcatcccaatgacgaatctggcaagacgggatgccaaagccagttgccagttttgagaagtccgggcacgaaacgcccgaggtccgatcagtccccacgtaagaacctttgaacaaggagttctgagtgtgcttgatcatcaagtagccatcgttgttgaagatgaaaagcttgatcggcaattggtggtgcacgattgtctgcagttcttgcaggttcatcatcatgccgccgtcgcagttgaggcacattacctcacccctgtccgtggcgaacgatacccctagtgctgcaggcaagccgtagcccatctcaccgaggccggtagaggtcatcaggcgctggccatctttcagacgcagtacctggtgcccacacaacagggcggtacccatatcggttacaacgatctggttcggcttgaatacgccgttcaggcgctccatgaaacgataagaatttatgaagccgtctttgtcagcatgctcttcacccacccaagggaattgagcttcataggctttacattgcgccaaccattgcgatttgctaggaattaccagtgtctccagacgagcgctcaatgcctcgataaaggcggcagcgtcactgatgatgacttcgtgtgtgcgtgaagcattcttgatcgcctcttcacgactgatatctaccacgtcgatccttgcttcgcgcgccagctcggtcaggtcataaccgacctgtggtatggccagtcgagtaccaatggcaagtatgtagtcactgttttgcaggataaagttagccgagcgctggccgtagacgccagcgcgtccgaatatcaaagggtgatcggagtcgatcatgtcgatacccgcccaggagacaaggcccggagtaccgagtttctccaggagcggtgcgatacgcttttcggcgccagccaggcggatgccgttgcccagccaaagcagtggccgttcggctttgagcagggcggccacgacgctgtcgacttgggcgcccacttcagcgctgatcgttttatcggtaacgggcgtcgggaaatgcgccatttcgttggctggaatgcggctggactgtatgtccattgggatttcgatccaagttggacccgggcggccttccagcgccacgtatgcggctttttcgagctcgtagacggcctgctccggctgggtgacgcgttgagtgtatttgcagacccggctcaccatctggcaggagtcgtagccctgaacgccccacatgcgcaaagggttatccaccgagcaatgcttggagtgctcattacccgcgatgaccaggcacggaatggagtcggcccaggcagacaccactccagtgacgccattggtggaaccggcgcctgtggtcagcaatgctgcggaaagacgaccattggtgcggtaataggtctgtactgccatgcaagcggcctgttcatggtgcacacagacaatctcggtgtagccacgacggctgatggcctcaaaaagatgaacgttaccggcgccaataatcccgaacgcatgtgtaatgcccaggttttccagtgcttcagcaatctgctcactaactttgattttttccagcgcttgcattttaaaactccgtcgatggacgcttcagcctgctcgaagaccagtagctgagttttgaaaaattatgggtgaggcacccatgtcttttggggcgtttgctggtcaatcaccatcccgaactcgagccgtgggcgacactctcgtgcgtcaggcatgatgacctctatcaacatggggcggggagcttccaaaaactccctcacagggacgtgaaagtcggtatcccgcgtcacgaccctgccagtgatgccataagcctcgccaatggctttgaattgagacgtgtagccgttccagtaggtggatgatgttcgaccctcaaagtacatttcttgaaagccgtgcaccatccctaaggaatgattgttaagcactattatcagtatcggtagttggtctcgcgcgatgatatccagctcttggatgttgagctgggcgccgccgtcaccggtaatgacaatcacaggcttgttaccagcgttgcaaacgccgatggctgttggaatcgcgaaccccatggcgcccagcccgcctgagtgatgcatagattggccatgacttaagcgtagtgtgtgagccacccacatctgattgttgccgacgtcggcaacataatcgacagcttggcctctggcctgctcacaaaggctcgaaaaaatcacgaaaggactgaccagccagtcgctgtactcgtccacaaagctgatctggaagcgggcacgcaattcggcagcccagacaatccaagcttttttattctgcacttgggaaagggggaagtgggcaaagaaggtgttcaattccatcacataggacgcgtgtgtttgaacccggttgttcaattgcccttccatcaggtctatctggataattttggccttgcgggcgaaatcatccggttttgcgccggtttgtcgaacgtccaggcggcttcccaataccagcagaaaatcgcagttttgtacggcgtgattggcagcacgcgtcccgtaggcgccgagcatgcctaggtagttcgcgctcgccgggattttttctgcgcctttcaaactggctacgtaaggaagatccagggcctctaactgcccgagccattgcttgaagtggcgggtattgaccgcccctccacccaaaaggatcaagggcctttcagcggatgccagtgcattgctgatcgcctcaatgtcgtattcactcagctgactcaccgcctgtttgtcactcagtgccaacagtccatttacgacgcggtcatcaatgtcggctcgctgtatatccatcgggatgtccagcaataccggccctgggcgtccttccctggcgatgtcgatggctttttgcaggcagggaagtaactcgtcgacctgtgtgacctgataggcgtacttggtaatgctgccggctagtgccacgctgtcgagctcttgaaaaccctgttggcggatgtgcctctcgcctttgagttcgtaggtattgacctggcctgtgagaaacaggcaggggtggctgtcaagccagcagtcggctatgcctgtcattaggttggtggcgcccgggccgcttgtgcccagggccacgccgagtaattcgtggtgcgttgtacgagcaacgccggatgccgcaaatgctgctccttgctcatggtgaactgataccagcctggtcttgcccagcttattgatgctgtcaaccaggtgcgtgatcatcccgccgatcagttcgtaaccatacagaaccttgttctgtgcaagaaccagcgccacggcatccgatgctttcatcgcctagaaaccaatcccgaagaactcttccagcttctcaccgacaaaatcgaaatgctcctggcccagcgccggctgcacgccgagccagaaggtctggttcatggtgcggtcggtattggtcaattcgccaaccactcggtattccagattctggaagtaaggctggcgggtcaggttgccggcgaacaggaggcgtgtgccgattttgtgctggtcaaggtacttgagcaggtcgacacgcttgacgccgctgctttccttgagtgttaccgggaagccgaaccacgatgggtcgctgttgggtgttgcctcggcgatttcgaggaattcggacaggctggacaagcgctctttgagcagcacgaaattgcgcttgcgcgtgtcgatgaagtcctgggcgcgttcgagttgcgccaggccgcaggcggcctgcatatcggtgattttcaggttgtagcccaggtgcgcatacacgtacttgtggtcatacccttgaggcaggctgccatattgctggccgaaacggtcgccacaggtgttgtcgcagcctggcgcgcagtagcagtcacggccccagtcgcggaacgactcggcaatcactttgagcatcgggttgttggtgaataccgcgccaccttcgcccatggtgatgtggtgcgccgggtagaagctgagggtggcgatatcaccgaacgtgccgaccagcttgccatcgtaggtggcgcccagggcgtcgcagcagtcttccaccaaccacaggttgtacttttcgcacagcgccttgaccttgcccaggttgaacgggttgcccagggtgtgagccagcatgattgccttggttttcggcgtgatggcggcttcgatcaggtcggcattgatgttgtgggtggtcatgtcgacgtcgacgaacaccgggattgcgccaaattgaacgatagggttgaccgtggtcgggaagcccgctgccacgccaatcacttcgtcgccctttttgatcgcccgctcacccagtttgggcgaggtcagggtgctgaaagcaaccaggttggcggaagagccggagttgaccgacagcaggaatttgacaccgaggaattcagccagctttttctcgaattcagcattgaagcggccggtcgtcagccagccgtccagggaggcctcgaccatcagttgcagctctcgtgccccgatcactttgccggacggcgggataacggtctcaccggccacgaacggcttgctcgccaatgcgaccttggcgtattgctcgacgagcttgctgatttcctggcggagcatatcgggtgtcatgaaaattcctgctaaaaaatagagttagttgctgttggcacgcatggcgagcatgtaggcgtcgatttcatccaggcaatgggcctgcatgtcgttgccgctcaaccaggcacgatgccaggtaacaatccgggcgagcgtggttgcaaggttccagctgggtgtccagtgcaggtgcgcgcgcgccttggaaatgtccagcttgaggtagttggcctcatgcggctgcgggtcctggtccaattgccaactggcccctgtgccccaggcctgaaccatgtgatcaaggatccattccaccgggcgtgcgtcttcatccttggggccgaaattccagccctgggcaaagtgatgcccttgggtccagaggtgttcagccaacacaaggtatccactgagtggctccagcacgtgttgccacggccgggtggccttcggattgcgtattgtgacgggctgacccttctcgaaggcacccagaatatcaggtatcagccggtcttctgcccaatcgccgccgccaatcacattgcccgccctgccggatgccaacgctgcgccttgcggatggttgaaaaacgacttgcggtaggcgcttgtgatcagctccacacagcctttgctgttgctgtagggatcatggccgcccatgggttcgtcttcacgatagccccattcccactcacggttctcgtagcatttgtcggtggtgacgttgacgatagcccgcaggttgggacattgccgcgcagcctccagtacgtgcaggctgcccatcacattggtggcgtaggtctcgaccggctcgcggtaagacaaacggaccaatggttgcgccgccatgtgaatcagcacgtcgggattaaagcgcgtcatgctttgggtgatggccgccaggtcgcgaatgtcgccctgctccgactccatgccttcggccaccctggcctcgacgaacagggcagggtgggttggcggcgccagggcaaagcccttcacctgtgcgcccatgctggtcagccagagtgacagccaactacccttgaacccggtgtggccggtcacgaagactcttttgccttgccaaaaggcaggagaaacggtcgacttcatattcagtcccaggatttccagggcgctttgccggactgccaaagctcttccagatagtgtttgtcacgcagtgtgtccatgggctgccagaaccccgggtgttcgtaagccatgagctggccttcggcggcaagcttcatcagcggctcctgttcccaggtggtgctgtcatcctccaggtatttgagcactgcggggctcaagacaaagaaaccaccattgatcagggcaccatcacccttgggtttctccttgaagttcagcacttggcctttctggatatccagcgcgccaaaacggccgggcgggaacgttgcagtgagcgtcgccgctttgccgtgcgacttgtggaaggccagggtcgcgccgatatcaagatcgctgacgccatcaccgtaggtaaagcaaaaggcttcttcgtctttgacgtagtcggcgacgcgacgcaggcgaccaccggtcatggactcgtcgccggtatcgaccagggtgatgttccagtcttcggcgcgttggtcgtgcaccttcatggtgttgtcgcgcatattgaaggtgacatcggacatgtgcaggaaatagttggcgaagtattccttgatcacataccccttgtagccacagcagataatgaagtcattgatgccgtgcgcggagtacatcttcaggatgtgccagagaataggtttgccgccaatctcgaccatgggttttgggcgtacgctggtttcttcgcttagccgcgttcccaggccaccggccaaaataactgctttcatgctgtctccgggtcaattcgagcttacaaaggcgtcagaatggaaatgtttgaggggcaggccagcctgcgtcagcagctcgcgtgcggcgtggatcatggcttctgagccacaggcatagaccgaggtatcggccaggtcaagactttctgcaaggacggcctgttgaacgtagcctgttgcaccgggccattgtgtatccgcacgtgagagcacggggcggtaggtcaggcccagcgatggaaaatcaggctgccagtacaagtcctgctccgtacggccgccccagtacacgtaaatgcgtttgccgctgagtgtttccggtgcgtcactcaagccttcaagcatggctttgaccggggcgattccggttccggttgccatgaacaccaggttcgtcgtgcttgcactgcgcaagcagaaggtgcccagcgggccttccagcctgagcaggtcattggcttgggctccgccaaaccagtactggctcatcacgccatcgggtacttggcggatatgcagttccagcttgccatcctcacgcacggcattggcgatggagtaactacgtcgcacaccgtctttgcctatgacgtcgatgtactgccccggaaggtagaagagtgcgctttttggaggcgttcggaggacaacccttagtacgtcgtccgccaggcgctccagggtatcgaggcggcaaggcatggttttgatctggatgtcggccagcaatcccaggtcttcgatgtccaactcgacatcggtgacggcggcccggcagcacgtcaggatggaaccgcaggcacgctcttcttccgtcagcgcgagttccggttgcaccacctctgtatcgccttgaagcacgttggccttgcacacgccacaacggcccgtacggcaactgtattccagcactgtgccttgggacttggcgcaatccagaaggctcttgccaggttcagccgtaaacgtcttgtggttcgacaatgtaacaatcgacatgcgtcaggcaccatgctcagggttggcgtcgcaaggattcgactcgtccactggagtgcgagggacggccgccatcggcccgatacttttgatacccatgtacgtatacatctcctgtcgtcattgccctgaaagtcatacgacattcagcgcgcagactacgcccctggccggggtcatttttcgtagagtttaaagcggatagaagccgctggcggaaggccccaccagttgaatcgcatatacaactcgcagcaacatcgcagcgtgttgctgattattgaataacggactgcctattgatggcggcaattctacctgcttgggaccgtaactggaaatgcaggatatccggggcctgcccaggccgtttcactggcattgagtgggcgggtcatacgctgttaccgatccgtttttgactccttccaaacatcacctaagtttgaaatgcagcttaggaaagctgcatttcctttatcgatgtcatggagtgtcaccaatgcaaaacgcctatatcgcctccttaatcttcgccttcctcaccaccctctctgtcaccaccaccgcagcgccctccgtcaaaaccgaggctccaatcccgatcacgacccaaatgtccaaggcagagcaatccgccaaggtcaatctgaacgccgccgatgccgaaaccctgcgtcgtgacctctttggcatcggcgccgccaaggccaaggcgatcatcgcctaccgcgagagcaatggtccgttcactgctgttgatgaactactggaggtgaagggcataggcaaggcgctgctggagaagaaccgcgaaaggattgtaatcaactgagcacaggacggccggtcaccgaccggccattccatcatccgaaacctgtgccttcaggctttcccttactacgtccagaatacgcaccgccagcgctgcgctttcgacacttctggccagcgccaatgcgcccactagcgtcgacatcattaccaggctttcttcatcggcattcgtgctaatcagcgtcgcttccacctgctgcaagcgcgccctcagtaccgcgtccgtggtcggactctgctggcccctcaaccccaactccgagcacatggtaggcaatgggcaaccctgatccggcgaggctcgatgccattcagataagtaactatcaataaatgcctcaagagggcgttcctggctgaacaacatttcgcaatgcgcatccagctcggcagctgcggcttgcagcgccttttctaccagttcgtccttggatttgaagtgggcatagaacccgccatgcgtcaggtccagagccttcatcaagggctgcagaccggtcgcgccgatcccgtcgcgacgaaagcgtacagaggcttccttgatgatgcgttggtgggtcttggctttgtggtcggatgagtaacgcataggtgggcctcagtgacaggctggcattttaaccaacttgaatctttttacacgctgacacgttggcatgaaaagtggttacctacccatcgaagattgttcaacaatcatgaaggtagccatgacactcagtttgtctctcgccgaccagattgccctggagcttcgcgctgacatcatcggcgggcgactgctgccaggaatgcctttggtcgaagtagaactggtcaaagcctacaacgcatcgcgcaacacgatccgtgaagcgttgcaccgcctcgggcaagaagggttgacccgttatgtgcgcaacaagggggtgatggtccggcggttggcgcgagaggaggtgcgtgatttgtttgtcgtgcgccgcaccctagagttgcaggccatcgctcagagcggtcccctgacggaggatcaatccgaacgcatgcaaaacgccatcgacgccaccaccctggcccgcgagcgcgaagactggcgtgctgtcgccacccatagcttggtgtttcaccagcacatcgtcgggttgatgcgcagcccgttgttcgatgagttttttgcccaggtcatcgctcaactgcgcttggtgttttgcgctgcgcctgatgagcagcgttttcagtcgccgtggctggagcgtgatcgtgatatctacacattattggtcgagcaggataaatcggcggcgggggaggcgatgagcctgtacctggatgattcggaacgcctgtccctggccttgtttaaccacccctgatcgaggatctgcaccatgtacaaagactatccggccgcttatcaggtcagtaaaggttcggcgttgcaggtcgacacagcgttttacgagcgcatccgtgatcgaaaagaccagcgcacgctgatcgagcagtttgaggtgccgattcgtacgggcagggcgtggaaggtgccagccgggcatgtgttccgtgtgaccacgccggttggcccgcaggtgggtgatttcaacgtatggaatgccaatgacccccgtgagcgcctgtgggcggcgcgtacccgccaattgcagggcgcccatgtcagcacccatgaccgcttgtggtcgaatttgccattcctgcggcctttggtgacgatcacggatgacagcctggccagctacgggatcgatgagcacggcgggcggctgcatgatttgcttggcacacgttgtgatccctatgttaatcggatgctcaccggtgaggacttccatcaccattgccactccaacctgacacgtgcggttttgccccacggactgacggaattcgacgtgcatgacgtgctgaatattttccagtgcactggtctcaatcacgacgacatgtacttcatgaaggcctgccctgcacagaagggcgactacctggagttctttgccgagattgatttgctgtgcgcgctgtctacgtgccccggtggggatttgtcgctgccgatgtgggggccggaggcgcaggacccgctgacggtgtgccgtccgctgggggttgagatctacacgttggaggatgagttgctcaatggctggcgccagccggaacgtgctgcctacaaggggcagcacgggttgcatattgccaaggcggattgggagtaacccaaggctcagcgatcctgcgcatccttggcatccgcctgggcgttgcgctcggccacacgcttgcgttgttcgtcggtgagttcaactttgttggcgctgtcacgcagcatcatcagcccaccgacgatcgacccgatcgcaactaccataatcaaccacgcataccacggcataaggctctccttgaggcagattgccgtgggagagttttcccacggtaataactgctttgagtgacgggctttcttactagttcagtgtaggcccgttctgcctcgtagtagatcagagcccggtcaacatcgcatccgccggtgcatcggcacggtcttgcgcagtcatctggaagtaggcgaaccccaccaccataaagcccaggaagatcagcccgatcagcgtgttgaaccaagccatggccaccaggcacaccaccgccagcaccagtgctatgcccggcacgatggggtaacccggtgcacggaaggtgcgctccagcagcggttcggtcttgcgcagtttgaacaggctgagcatgctcatgatgtacatcacgatggcgccgaataccgccatggtgatcatcgccgcggtcagtgtcatgccacccaggttgatcaggccgtcgctgtagatcgccgcgatgccgatcacgccgccggcgatgattgcacggtggggggtctgaaaacgtgacagtttggcgaggaaagacggcaggtaaccggcgcgggccagggcgaagaactggcgcgagtagcccaggatgatgccgtggaaactggccaccaggccgaacaggccgatccacaccagcatgtgcaaccagccggagctgtcgccgaccacggttttcatggcttgtggcagtgggtcgttgatgttcgacagggtgcgccagtcacccacgccgccggcgaagaacatcacgcccatggccaggatcaccagggtcaggatgccgctgatgtaggcctttggaatggtgcgcttggggtctttggcttcttcggcggccatcgcggcgccttcgatggcgaggaagaaccagatggcgaagggaatcgcggcaaacatgccggcaatcgccggtgcgccaaaagtatcggaaccggcccagccattcagggcaaagttactgaagctgaaggcgggtgccactacgcccatgaacaccagcaattcagcgacggcgagcacgcacaccaccagttcgaaggtggcggcgagcttaacgccgaggatgttcaggcccatgaacacgatgtaggcaccgacggccgcgtgtttggggtccagcgccgggaactgcacattcagataggcgccgatggccaaggcgatggcaggcggcgcaaagacgaattcgatcaaggtcgcgagccccgcgatcaagccgcctttctctccaaaggcacgacggctgtaggcaaacggcccacccgcatgaggaatggcggtggtcagttcggtgaagctgaagatgaaacaggtgtacatcgcggcaaccatcaatgaggtcaccaggaagcccagggtcccggcgacgccccagccatagctccagccgaagtactccccggatatcaccagcccgaccgcgatgccccataagtgcagggtgcccaaggtgggtttgagttgtgtgttcatcgtgatgcgctccctgaacggtttggaatgattcaaggtgttgcagcggacatgccatgcctcacaaccgtgtcgtaaagcggcgcaactgtcgtctgggagatggtttggcgtttgaaattttccggtgtcgcaccagataagtgcgcgggtggctggcagggcctcatcgggggcaagccccctcccacacttggcctgcgtagaccggtcaacatgtgggagggggcttgcccccgatggggccctccaatccagcacaaccctccctgtaaaccccgcataaacccactctttacgccgtctttacgccccgcccacaccctcgctctcgttcctttacgccactcctgccgacaattgccccacacgcggcactcgccgctaaacggagagacttccatgagcgttctggacggggtgtcactgctattggccgtggcgctgttcatttatctgctggttgcgctgttacgcgcggatcggaactaggagctggccatgcacagttatgactattggctgatcattgccttctttgccgtggtgctggtgccggccccgttcctggggcggttctattacaaagtgatggaggggcagcgcacctggctcacaccggtgttcggccctgtggaacgcgcctgttatcgcctgtcgggcgtggatgagcatcaggaacagagctggcagaagtacatgctggcgttgctcgctttcaaccttgcgggctttttgctgttgttcgcgatcttgttgttccaggactacctcccactgaacccgcagaaattgccggggcaggaatggacgctggcgttcaacactgcagtcagtttcatgaccaacaccaactggcagtcctacagcggtgaagcgtcactgagctacctcagccagatggccggcctgaccgtgcagaacttcgtcagcgcggcgaccggtctggccgtccttgtcgctttgtgtcgtgggatcggtcgcaaatccaccaagacattgggcaacttctgggtcgacatgacccgcgccaccctctacggcttgctgccgttgtgcctggtgctggcgttgttcctggtgtggcagggcgtcccccagaccttcgcccattacgtggatgccgtgaccctgcagggtgtggatcaagtgatccccctgggcccggcggccagccagattgcgatcaagcaattgggcaccaacggcggtggcttcttcggtgtcaactcggcgcatccgtttgaagaccctaccgcttgggcaaacttgttcgaagtggcgtcaattatcctgatccccgtggcgctggtgttcaccttcggccactacgtgaaggacctgcgtcagagccgcgcaatcctcggctgcatgctggcgttgttcatcatcggcggcgcgacctcgctgtgggccgaataccagcccaacccgaccctgaacaacccggccgtggagcagactgcgccactggaaggcaaggaggcacgcttcggtaccaccggcacggtgctgtggtcggtgaccacgacagcggcgtccaacggctcggtcaacggcatgcaggacagcctgagccctctcagtggcatggtcgcgctggtcaacatgatggtcggcgaagtgatcttcggcggcgtcggcgctggcatgtacggcatgttactcaacgtgttgattgcagtgttcctcgccggcctgatgattggccgcaccccggaatacctgggcaagaagctgcaggccaaagaagtgcaattgctggtggtgaccttgctggtgatgccggtgggcgttctggtgctcggcgccattgccgccagcctgcctggcccggccggcgcgatcagcaaccctggcccccacggtttcagccagttgctctacgcctacacctcggccagtgccaacaacggctcggcgttcggtggcttcagcgccaacaccccgttccacaacctgatgctgggcctgggcatgttgatcggccgcttcggctacatcctcccggtactggccctggccggtagcctggcgatgaagaagaccgcaccgattggccagaacagcttcccgacccatggcccgctgttcgtgaccctgttgaccgtgaccattctgctggtgggcggcctgaccttcctgccgacgctggcactgggccctatcgctgaacatctgagcatgggcttctaaggggatatgaaaatgaatatgcctgcaaaaaacgcagctcctgccaaaacccaggagcctgccaaaaccgccatctccgccctgtggcgcccggcgctggtccaggcgttcgtcaagctggacccgcgccagctgcaacgctcgccggtgatgctggtggtcgagttgaccgccatcctcaccaccgtgttgtgctttgtgcccgacaccgccgtgccgacctatgtcgccgtgcagatcgccgtgtggctgtggttcaccgtgctgttcgccaacttcgccgaagccttggccgaaggacgtggcaaggcccgcgctgacagcctcaaggccggcagcgaaggcctcagcgcacggcgcaaggaggccgatggcagcttcaaggtcgtgccggccaccagcctgcgcaaaggtgatgtggtgcgtgtcgccgccggggaaatgatccccggtgacggcgaagtcatcgaaggcatcgcggcggtcaacgaagcggccattaccggtgagtcggcaccggtgatccgcgagtccggcggcgaccgttcggcggtcaccggcaacacacgcctggtgtcggactggctgctgatccgcatcaccgccaacccgggcgagtcgaccctggaccgcatgatcgccctggtggaaggggccaagcgccagaaaacccccaacgaagtggcgctggacattctgctgatcggcctgaccctgatcttcctgttggtggtggtaaccctgcagccgttcgcccatttcgccagcggcagcttgccgttggtgttcctggtcgcactgctggtgacgctgattcctacaactattggcggattgctgtcggccatcggcatcgccggtatggaccgtctggtgcgcctcaacgtgatcgccaagtccgggcgtgccgtggaagctgcgggcgacgtgcatgtgttgctgctggacaagaccggcaccatcactttcggtaaccgtcgctgtgcggcagtggtcgcggcgcctggcgtcagcggcaaggaagtggccgagggcgcgttgtttgcctccctggcggatgacacggcggaaggtaaatccatcgtcgaatacctgcgcgccttgcaccctcaagccgagccgagcgcagacgaactgacggccgtgccgttcagtgctgaaacccgcttgtccggtgtcgactaccagggccgtgtgttccgcaaaggcgcggtggattcgctgctggccttcatcggtcaacaacgtcgcgacttgcagcctgcgctgtcgcgggaaatcgacaagatcgcccagagcggcggcaccccgttgctggtgtgtgccgacggcaagttgctcggcgcgatccacctgaaggacgtggtcaagccgggcattcgcgagcgtttcgccgagctgcgcaaactggggatccgtaccgtgatggtcaccggcgacaacccgttgaccgccgccgcgattgccgccgaagccggcgtggatgacgtactggccgaagccacccccgagaaaaaactcgcccgcatccgtcatgagcaaaatgacggccgcctggtggcgatgtgcggcgacggtgccaacgacgctccggcgctggcccaggcggatgtcggcatggcgatgaacgatggtacccaggctgcgcgcgaggccgccaacatggtcgacctcgacagcgacccgaccaagctgctcgacgtggtgcagatcggcaaggaattgctggtgacccgtggcgcattgaccaccttttccatcgccaacgacgtggccaagtacttcgcgatcctgccggcgctgttcgcctcgatctacccgcaactgggcgtgctcaacgtgatgcacttgcagagcccgcagagcgcgatcctttcggccatcgtgttcaacgcgctgatcatcgtggtgctgattcccctggcgctgcgcggtgtgcgcgtccaggcggcgagtgcggcggcattgctgcggcgcaacctgctgatctacgggctgggcgggattctggtgccgttcgtgggcatcaaggcgatcgacatgctgctgactgcgttgcacctggtttgacccgattcctgtgggcgcccggcgggtgcccacaggttgcaatgaccgaattgaggaatccgaaatgtccaacatgatccgcccggccctgagcctgctggtgctcatgaccctgattaccggcgtcgcttacccactggtggtgaccggtgtcgcccaagtggctttcccggaccaggccaatggcagcctggtacgcgatgacagcggcaaggtgcgtggctccagcctgatcgcccaggattttaccggtgacaactggtttcacccgcgcccctcggctggcgcttttgcgacggtctccagcagtgccagtaaccttggtccaagcaacccggcgctggcgacgcgtatcttcgatgacgcgagtaaacagctggtgccgagccaggggccggtgcctctggtatcgctgactacctctggcagcggtcttgatccacacttgccaccacaggcgattgcctatcaactggcgcgggtggcggcggcgcggaatgtgccggtgtcgaccttgcagcgcttgctcgatgaacacatcgaaagcccgctggtgggcccgccggtggtgaatgtgctggcgctgaacatggccctggaaaagttgtaggccgtggcgcagccatcgcaggcaagccagctcccacaggggaatgcattccaaatgtgggagtgggcttgcccgcgatggcggcctgaggcgcaaccaataaacatctgaaggaaccccgagcatgagcgactccggccgcgccgatgccctgttagccgatctgccccgggacggccgtggccggctcaaagttttcctcggcgctgcgccgggcgtgggcaagacctacgccatgctccaggccgcgcacacgcagttgcgccaaggcgtgcgcctggttgccggcgtggtcgaaacccacggccgcgccgagaccgaagccttgctcagcggcctgccgcagcaaccattgctgcgcagtgaataccgtggcgtgatgctcgaagaaatggacctggacggcctgctcgccgccaagcccaagctggtgctggtggacgaactggcccacagcaacgcccccggtagccgtcacgaaaagcgctggcaagacatccaggaactgctcgccgccggcatcaacgtgtttaccacggtcaacgtccagcatctggaaagcctcaacgaccaggtgcgcggcatcaccggcgtgcaggtgcgtgaaaccctgccggactgggtgctgcaagaggccgacgaactgctgctgatcgacctgccgtcccgcgagctgttggagcgcctgcgcgacggtaaggtctatgtgccggagcaggcgcgtgcggccatcgatgcgttcttcacccagaccaacctcatggccctgcgcgagttggcgatgcagaccgccgccgcccacgtcgatgacgatttggcccaaggctatcgccagctcggccaggctgcgccggcggtgcgtgggcgtttgctggtcggcgtggatggtgatgcgcaggccgagcgcctggtgcgtcatgccagtcgcgtcgcccagcgccgccatttgccgtggagcctggtgcatatcgataacggtcgtgcgcgggacgaacagtcgcggctgcgcctgcaaaatgcccagcagttggccgagcgcctgggcggcgaggtggtattgctgcgcgcaggggaggtggccaagacactgatccagcacgccgccgaacgccgcgccagcctgctgctggtggggcagtcgcgcatgcgttggcgccgtcgcttgttcggcggcggcctggctgcgcgtttgctgcgtaatgcgcggggcttggaaatcaacgtcctcgacagtgacgacatgcctgcgccgccacgcttgccggatgtacgtgggctggtgtggttcgactatgcgctggcagttgtggcaacggtggcggcggcggcggtggcctgggccgtgtccagcgccttgccgttgccgaacatttcgttggtgttcctcgctgcggtgttgctggtggcggtgcgcagcagcctggggccgtcgctgatgtgtgcggcgctgtcgttcctgacctacgacttcctgtttatcccgccgaatttttccttcgccatccaacgtgaagaagacgtactgaccctgttgttcttcctgttgatggcggcgttgaccggcaacctggctgcgcgccagcgccgtcagttgcaggcgttgcgcgacacccaggaagaaaccagcgagctgctcgacctgtcgcgcaaactcaccgccgccactgatcgccaggcggtaatcagtgctgccgcgcatcacctggagggctggagcgacctggacctgtgccttgtcaatcgcgatggccagggcggttgggccatcgagacgggcggcccgctgaccctgactgaagctgagcgtgccgccgccgattgggcctggcaacatgaccaaccagcgggcatgggcaccggaaccctgccgttcgggcgttggtggtggtggccgttgtcgggcgaagaaggcccgttgggtttgctcggggtcagccccaaacccggcctggaattgagcgggcaacgccgtcgtctgctcactgccttgagccaaccgctggcccaggcgctggcgcgggcgcaactggcccaggagttggagtctgcacggttgcacggcgaaaccgagcaattgcgcagcgccttgctggcgtcggtatcccatgatttgcgcacgccgctgacctccatgcgtggcagcatcgacagcctgctggcgctcggtgaggccatcccgctggaggaccgccgcgagttgctcgaaggcacccgcgatgaggctgaacgtctcgaccgttacatccagaacctgctggacatgacccgcctcggtcacggcgctttgaagctggcgcgcgattgggtgtcgccgggtgatatcgtcggcagcgccctcggccgtctgcgtgcgatgctggcgccgttgcaggtgagtaccgaagtgccgcccgagttgccgttgttatatgtgcacgccgcgctgatcgagcaggcgctggtcaatgtgttggaaaacgccgcacgtttttcgccgccgcaagggcgcttgcaactgagcgccggcgttgccgataaccagttgttcttcgccgtggctgacgaaggccccggtattcccgaggatgagcgcgcaaagatcttcgatatgttctacaccgcagcacgcggtgatcgaggcgggcagggcacggggctgggcctcgcaatttgccagggcatggtcggcgctcacggtgggcatatcagcgtggccgacggcattgacgggcgtggcacctgcatcaccttgttcctgcctttaccgacacagcctggcctggagcgcgaggcatgagctaccctgttttcttcacggattttgattggaagccatgagccagaccgcgacgattttggtcattgatgacgaaccgcagatccgcaaattcctgcgtatcagcctggcctcccagggctacaaagtgattgaggccggcactggcaacgaaggcctggcccaggcagcgttgaacaaaccggacttgttggtcctcgaccttggcctgccggacatggacggccagcaggtgctacgtgaatttcgcgagtggtcgacggtgccggtgctggtgctgtcggtgcgggccagcgaggggcaaaaggtcgaggccctggatggtggtgcgaatgactatgtgaccaaacccttcggtatccaggaattcctggcccgggtgcgggcgctgctgcgtcaggcgccagcgggtgaggcccaggaagcagccttgcgttttggcccgctgacggtggacctggcctatcgccgggtgctgctggacggcgccgaagtggcgctgacgcgtaaggaatacgcagtgctggcgcaactggcgcggcatccggggcgagtgattacccagcaacagttgctcaaggatatctgggggccgacccataccgaggacagccactacctgcgcatcgtcgtggggcacctgcgtcagaagctggcggatgacccgacccagccacggtttatcgtgaccgaggcgggagtggggtatcggttattgggcggatagatagacctcaggcgcgctctgtggcgagcgggcttgttgtggcgagcccgctcgccacaacggctttagtgacacgtctgtttcagcgttgctcactttcataacggtccagcgtatcactggcaatttcccgccccagggcgatcaactccggcgctttgtagaactcgaaaaaccggcacacccgcttcggcacgttgatcagcacgtctggcgggtagcccgcgatcttgtactgcgccagcgacgtctgcatcacctcgaagctctggttgatcaggtccagcagcgaagccgggccgacgttatcgatgatgaacgacccggttgccgacttcggtgcgccgggcttttccggtgccgcggcgggttgttgggattccggctcggcagattccagccacgggttgatctccgccgcctgcgcttccaacgcctcctgctccagtttcatcagttgttcggcctgcttgcggcgaaagggcaggtgcgaaccgagtgatctcgccaggttgttgaagcggctcttgaacgcgggtgggcgttggatcaccggcaactggtagtgcttctgattggtggcgttgaggttgaccgcgatgatcaagtcacagtggctcgacaccaccggtacgatgggcagcgggttgagcaggccgccgtccaccagcatgcggttgccttgcatcactggggtgaacaggctggggatcgccgccgaggcgcgcatggcttggtgcaggcagccttcctggaaccagatttcctgctggttggtgaggtcggtggcgacggcggtgtaggggatgcgcagttcttcgatgttgatctcgccgacgatcttgcggatctgcccgaagactttctcgccgcgaatggcgcccaggcggaagctcacgtcgaccaggcgcaacacgtcgaggtagtcgaggctttcaatccagtttcgatactcgtccagcttgccggcggcgtaaatgccgcccactacggcccccattgaacagccggcgatacaggcgatatcgtagccgcgccgttcgatttcctcgatcaccccgatatgagcgtacccccgggcgccaccggagcccagcaccaacgcaacacgtttcttcatggtccatgtcctccccaaggcaggtccccacaatgcacccatgagaggccggcttcaatattcgtgggagcctgcaatatttttccagaatagcggtgttgctcgggtatgctctggtcaataggcactaccgatttcaggctaaggacaggcacttttccctgtaggcaacgtctacaacgtacgactgttttttcttttttgaggtgtcatcgatgaaagcctggatgtgtgtgcctgtgatcgtgttggccctggccggttgcgccgggaaaaccgcataccgcgacagctgcggcagccagttggacgccgcctggaaagaactggacctggctaaggctgaaggctttgccggtaccgtgagctactctaaggcactgtctttgttgacgggcgccaagacccagcaacagtttgaagcgtttgaaggctgctccaacaaggccgagaaagcgcgtttctatattcgtgagtctcgcgccgggcgttgacctgcagcgagtaggatttttcatcaggtagtgagggcaggatgtcagctttggtcgatcagttagtcgctcaggtcattggcctggaagtagggttactgagctgccaggctcgccttgccgccgtcaccgatgatgaagccctacatgacctgcgcaccaccgtgcgccgtctgcgcagcctgttgcggcccttgcgcgggttgccaggggtggagcagcttgaagtggcggccagcacggtcggccaattgaccacgccgctacgcgaccgcgaggtgctggcggcgtatttgcaccagcatggccatcatgaggccgcaaaccgacgactgtgcctgcaacccgaagcctatcgtcaggtggcgcaaagcccggaacttgcgcacttgctgctgatcctcgacgccttcccgcgtttcctccgtgcttctgaacaccagaaattgctcaaaggcctgcgaccacgcatcgaaaagcgtctggccaagcaatggcagacactcgataaggccttgaaggaaccgggccatgatcgccaccgcctgcgcttgctgatcaaacgcgtgcgctacgctgcagaagcctatcccgaattggacaagttgcccgccaaggccatgtcgcacctgaaaaaagcccagggcgcccttggggattggcatgattgctggcagtggttggcccaggctgaacaccaggcagatctgcaaccttgtgttgccgtatggcatcgcaccatggccaaggcgcaggggcaggcggaccgcgtgctggataaactcagtgctgattgtttctgaaccggtccggtttttggccggaataggcgctgtacctgattggtccgatggttaagatccctcatctgttccttttgatgtgagaccgccatgcgctttagtgatttgctcgacgccgcccgcagcaacccgctggatgtgaccatccccgctgagtgggcccagggccgtgcgacctttggcggcctggtcgccgcattgcaatacgaagccctgcgtgcccaagtgcccgcggatcgtcctttacggtcgttggcaatcacctttgttggcccggtagcgccggacgtccccgccagttatcaagtcgaagtgttgcgtgaaggcaaagctgtcagccaattgcttggccgcgtggtgcagaacggtgaagtgacgacactggtacaggccagtttcggtggggcccgtgagtcggaaattgcggtcgaaagcaaagcgcctccggtgttcaaacattgggatgagtgccaggaactgccctatatcaagggcgtcactccggagttcatgcgccatctggcgatgcgttggagtgtcggcggcttaccctttaccggtaacaaatcccgcgacatgggcggttgggtacggttgcgcggcgatgtgaaagaagaaccgctgaccgaagcgcatatccttgccctagtcgacgcctggcccccggcgttgctgccgcacctgaaaaagccggcgccgggcagcaccctgacctggaccatcgaattcatccagccattacaagacctcacgaccctcgactggtgccagtattacgtcaatatcgagcacgcccgcgacggctacggccatgccgccgccgccctgtggagcccgaccggcgcactcatcgccatcagccgccagaccgtggtggtcttcgcctgacctcaatgctggtggcgctgccgccaggcacgccaccagccaccgctcaacacaaaacgtggaaaggtcacgaactgctcgaccatcaggcgctggaccgaatctttacgatcactgaacggctcactggcctcggcctccaggctatgcccatgacgctgcaacgccaggccggccaagataccgaccacaccgacggcaaagctggccagactcaggctgaacaccccggacacaatcaacagaaacccgatgatgaacagcggcacggcaatcaggtgcaacgccaggttggtcgggtgctgatggttctgcgggtagtgacgccattgccaggcggggagattggggtgacgtttgcccatgatggtgaatcctctgtccgttgaaacaacttgaacagagtttaggtggggggggggcggggcggcgaattggggttggctatggggctcatagagggtagttttgggcatgtccccgtgatgcccaaataacgcattaatggtggtccatgtgcatcaagaacgtgaggttgttatcggctatccagactagatatccggacctctcacccagaaccgttgcaatatcttgtgcatcatggattttccaagccttgtatgcgaaatcgaacaccactaaaaccagattttctcggctaatacgattctgtatgttctgaaaaaattagggttgtgctctgtgcttttttcatccgattcgactgggtcgagtacattactttctgtcttgaaatactgctttgccagatagttaatcgaagtggtaagtttagtcgatttaattttttggcgcgtatatttaaagtttcgaatgaaaggtctatctttttttcgagataatacatcagatagcgccgcctaggggtattcttggggggttgtatattggttttgagttatttgaaataatagtcgtctggatcgttgatgtaaacagttggtccgctaagtgaaatgaattttgcgttgaactctatggatgcattgtcgctggtagcttcaaaagtaaagtagtccatttttttattgattgttacggtaaataactcatgtgctgggatgttaaagactttcaggttttcaatgtcgttgcaggttatcccaagtctgcacatgttataccctttgtttttccatttttctggcagtttgtctggaaattcggggatgtcgaatcctatcccaacacaaggttgatcattttctacccttaatgagaaaagggctatttttccaatttcaacaggaaggctgaaaattttactgaggagtatactgccctctaactcgttccagtatttcattttttatttcctgaatggatagtgtttttttgcgccttcaatataaccttttcggggtttttcgattggtcgcaaattaaagtgcgctgaatggtctccaataccgtctacgcttccgtatttatggcctgctgagtggtcttggataaggattttcgagccgtttgctcttgtgaattgatagacttttgtgtttatgggtttgccgttttcatccaaaattgttttcctattcttgtctgtcattttttcagccgtgtattgttttgcctttcctgtgtctgggtctattaccatgtctggagtctgaaccatcggtatcccagcatctcttttcgcttgtctgaaggcgcctcggcgagaaacatcaggtgtttccggttcattctgtgttttacaggctggctgttgtatccctttcggcggacaattggcgctcagccctgtcgcatccacccagccagtagggttgggcacgtacaggtacgtgttaattccacccgccaacttcaccggatccggcgtcaggtaccgacccacatccggattgtagtagcgatgacggttgtagtgcagcccgctttcctgatcgaaatactgaccctggaaacgcagcgggttgtcgacttttctgatgtcgaggcgggtgatttccccgtaggcgcggtaatgcgcggaccagacgatttcgccatccggggcggtgagttcctgtggggtgccgaggtggtcgagttggtagtggtaggccttggtttccttggggccgaagccttccagcagcgccagcggacggaagctgtccggttcatagagatagctgcggtgccgatccgcgtggtgttcggcgatgagtttgtcgccttgccagaagaactcagtggttacaccgtcgacggttttactgatacgccgcccaaacgggtcgtagcggtagctggcggtctggccgttgggttttttaataccgatcagacggtgctggcagtcgtagcggtattcggtgacgagtacgtggcctttgccgcggcgttcgcgaatcaggttgccgaaggcgtcgtagtcatagtggtggtcgccctgaatcatcaggcggttgccggcgacgatgtccgggccggggcggttgtgcatcagcaggttgccggccgggtcgtggccgaagcgctcctgttcgtcttgggagtggtcggcgcgggtgaggcggttgagtgggtcgtagtggtagcggtgttcgcctttgcgggtgtcgagcaggcgggtgaggttgccggatttgtcgtagtcgtagtggcgtctgtacaccgggccttcggcgtcattgatgctctggttgaacaggcgtccctggtggtcgtgttgatagcggctgagcagttggccttgttggcgttgctgttcgcggccggccttgaacaggtgtgaggtgagtaccgcgccgttcagttcgacggtggcgaggtggccgcctttgtcgtgagtgaaggtgaggcggttgttgtccggcaggcgcaggttttgcaattggccgcaggcgtcgtagccgtagcgcagggtgccccagccttggtgttcggtggtgaggcggttttggctgtcgtactcgtaggccagggaccagtggccgtcttcgacgcttaggagattgccctggcggtcgtaggcgtaatcgacggtattgccatcgggcagggtttttctgacgaggcgtccggcgtaatcgcgctggtagcgggtaaccaactgactgccgtcatcgccgtgttcggtcttttccgaaaggttgccattaaggtcgtaaacgtaagcggtgcgctggccgtcaaacccggtttcctgctggatcaggccgttgttgtggtactggagccggtaggtctcgccaacttcgttttcgatttcggtcagcagtaaccgcgcgttgtcgtagcggtagttgacctggctgccatcggcattgatacggcggctgatcaggtgcaggccgtcggcgtattcgtagcgggtgacgtgcccgagttcatcgcgctcggcggtgatttttccgtaggggttgtagttgtattccctgaacccgtcgcctggcagcacaacacgaatcaaccgacccacgccgtcccactgatactgggtcagcgcgccatgttcatcctcacgcgcaatctgtcgtcccagatcgtcatagcgataacgcttgatcccaccattgggcaactgctcctcaagcaactgcccacgctcattccataccagccgctgacagctgtgatccggataccaaaccccaaccaactgtccgtatttgttgtaggtgtaatcggtaacgtgaccgtcaggatcgatcttgcgaatgacatcgccctggtcattgcgctcatacttccaaaccgctttaccacgccgcacaacccgtacgaacccgttgtcatgctcgtaggtcgtcggctcatcgtcccccggaaacaccgccaccaagcgcccggcttcgtcgtactgatacgcggtgatcgcccccagcggatcctgctcaacggtcagccggccttggtcatcgtaggatttgaaatgctcggccccgtcaggatcaacccgctgcaccagccgcgcccgctggtcatgtacgtagacttcctggctgccatcggcgttaaacaccgtgacctggccgttgtcatcccaggcatagcgcgtgtccatctgcgagaaactcgcccaatgccgcacacaccgcgccgtcttgccagaccgttcccattcccagaaaaagctcgccccaccggccaagccacgctcaagaatgacgtgctgttcgtcgtaccgataaacttcgctttcgccgacggcattggtcgctgaaaccagtcgtccaagctcgtcataggcgtaggaaacaaccgtctgctccgtcacccaaacaaacggcccctcatccacaacgcgatgaatctggtaatccaccgccacgatgcggcccgacgcataacgcaaaaacagcgagcgcccgacaccgttatccacccgctcaacacgccccagaaaatcccgggaaatacgcaggcggttgtcatacgcatcgctgatcgttgtcagcacaccgtcgcggaagtggtagaaacgtgatgcctgcgccagcaccagttcatcaggcaacgaccctaggtagatcgccgcttcggccaagctattggtgatcgcaggccgagaaaccgtgggcaagggcagggtggtcgaccgattctcatgatcggtccaaaccaccgaatccccggaaacactcaaccgatgcgccagcgagtgactccagccaaaccccaacccaccatccacttccaccgcactggtgcggtacaagcgagtccactcaaacggcaagatcccgtccagcgtcccatcggtgagggtcagcaactcctcgccggtgaccatcgacaccgggcagccgttggtggcggtcttgtcggaaggcgctgatgcatccccagccggattcttcgcaacagctggcacgtcatccacatgctcttgctgaaccaacacagttcgccgggacttgctgcgcaccgcaggcaccgcgttggcaaccacctgatccccagccttcaacggtgcatccggaactaccctgatcggcgtcgcggagctacccagcaacaccggcctggccgcctcgacatgcgcgtccaaccgaggcccgaccagttgatccgccagcatttgcagccatctacgcacgcgtccggacttgatgtgccccagcacctgcatacccaaacgaagctgaacccccatgccccgcgtggcccagatcagaaacagattgatcagtacctcgccggttatctcgcccagcagctcgtacatctgcggcggtggcagcatgcgtatccaggcaaccatggccgacaggtagataaacaacagcggctcatcgctgagcacaagcaggccctgggcaatggcgtccttgcccagtttcagcagttcatccaattcggcctgggagacgtattgcagcaacttcaggctgttactcttgaggtccgccagcaggtcgtacagttgtgtgaaattgtcccaaaggttgtagaacgccttgccgatcccggttgagagcgccaggccttgcattgcactgcgctcgaatggcgtggcgttggcaaagtcgtcccattgcggcttgaaggtctttttccattcatcacgcaggcccctttccagccccgcgatcaccgacagataagacgcatacagcgctttgatgtgatcattcgaaacgttgggataaaaggtgatctgatcgcgggcgcagtcgctgactgcaagaatgccgctggggccgatggtgcgatgaatcgacgggcccaccgggctgccatcaggggcgaccggttgcagcatcaccggcgtattgccgataggcacaaaccgcgtgctctcgaacatatgcaccagggtcaacgagccctgggccttgcaggtggcgaccgtgcgattcggtttcttggaggacgccggagcggcgagggaaacctcgtccccgaccttgaacacctgctcgacttccaatgccgaaccgctccagaagctttcggcccactcgtcaaaggtgttcaggcattcacgcaagtcacgcaggacgccttcaacgtccggcgccttggcatccatgggcgcgaggatgaaacgtgcaataacgggaatcatgaggcggccccgttgagtggggcacggctagagaggtgcatcggcggtccctcgcgctgattgatcaggcgagagactttggagaggttgccagggaaaagaagtcggcgttattcgccgagagggttaggacgtttcgccaaaacctcgggcaaaccgaggctttgttgtaggcagaggattacgggttgagcagtcctacagcttcaactgcccaatcgccttgctcagctccccggccagcgtggccagttcattgctggttgtcgccgagtccacggtttgctgcacggtgttctcggtcacatcccgaatgctcaccaccgcacggttcatctcttcggcgacgtggctttgctgctcggcagcgacggcgatctgggtgttgctttcacgcatctgcgccacggcgctggtgatttcggcgagggcggcaccggcttcctgggcttgttgcacgcagtcgtcagccttgaacgagctttcctgcatgaaatccactgcgtcacgggtgccggcttgcagcgccgagaccatgcgggtgatttcgtcggtagagctttgtacgcgtttggccaggttgcgcacttcgtcggcaaccacggcgaacccccggcccatttccccggcgcgcgcggcctcgatggcagcgttgagggcgagcaggttggtttgttcggcgatgctgtggatcacgctgaccacgccgttgattttctgactgtcctcggcgagcttctggatcatctcggcggtctgttgaacgcccgtggagaggccggcaatcgagcgttgtacgcgggtgaccacttcctggccgctgcccgccagggtgtcggcggtctgggacaggtcgcgggtggcgcccgcgtgctgggcgatgtggtagacggtggcggtcatttcgttgatggcagtggcggcctggtcggtttcgctctgctggccgagcatgccgtgctgcacatcgttcatgctgctggccaaccgtgcggcgccatcgtcgagttgctgggcggtgcgtgccacggtgttgaccacacgctggtagccggcttgcatggcgttgaacgcgctggccatctggccgacttcatccttgcaggccaacggcacgcgggccgacaggtcgccggttttctctacgtgcagcatcacgtctttcaaggtgttgagttggctgagcaggaagcggatcagcagttgcgaggcgccgagcatcgccagcatcaggatcaggactgccaccgcatagttggcaaagcgttcttcgaacacttggctcaggcttggcgcgtaggcgagcacggcgacgtattgaccgtcagggcgggcgatgacttcagcacccatcagcgggttctcaccgaacaacggcatatgattgagttcgacccagcccaggttgctgcccaggggcgacagatcctgctccgccagttgtgggacctggccgcgcttgaacgtcagccagtgctcgcccttgggcaaagcttcgccagtcggccacgcattgaacaaatgtgcctgcgcctgggccgaagccctggatgcatcgctgcgggactgttgctcaagctgcacggcatacagcaccagcagcagggtggtaatgaaggcgaccgcattgacggcccagaatttgtacttcagcgagatattgctaagccaggcacccatggaaggttttctctgatagcggaaacagcattggcaaggtgccattattgtgccgctatccaggaaaacggttttgacatgggtcaatgcgccgcatcaatccattgctggcaagccaaaaaagctgcgggcgcaggccgtgctgtgacgggccaggtcttccaagctctcgttgcggtgcagggcgacttcgcgcagcacttcaggtagatacgcgggctcgttgcgaccgtttttcggttttgggcgcaaggtgcgtggcagcaggtagggtgcgtcgctttccagcatcagacggccacggggaatttccctgaccagggggtgcaggtgtgtcccacggcgttcatcgcagatccagccggtgatgccgatgtgcaagtcgaggtcgaggtagctgaacagcgcctgttgttcgccggtgaagcagtgcaccacagcggcggtgagctggtcgcggtagtccttgaggatgtccagcaggcgctggttggcgtcacgttcgtggaggaataccggcaatttgagctcgacggccagggccagatgttcttcgaggactttttcctgctgcgggcgcggtgaaaaatcccggttgaaatccagcccgcattctcctactgcgcgtactcggttttctttcagcaaaccgcgcaaacgcgatgcgctatcgccgttccagtcaatggccgagtgggggtggatgcccgcggtgctgaacaggcgctggccgctttcatcgagtttttcgcactgcgccagggcctgttcgctgccctcgatgctggtcccggtgagcaccaattgttgcacgccggcagcataggcacgttcaagcacggcctggtgcttctcgtcgaaactggggttggtcaggttgacgccgatatcaatgagttgcatggtgctatctccgcctgcggccggaaagcatatcagagctgtagatttataagaaaaacgaagaactacaacgagttatagctgtctttgaacgtcgcaagcgacattgtggttggcccgccgcctgccaccatgccgccgttgcgtaccttgccagcgcataaagcgctctgtttctgacccccaccgcctcgtttttcgcgagggcgttggccagtattctttccggagagcggatgatccgaccctcggcgttgcttatgttgtgcctgacgatgctgctgcccatggcggcggttgcacgtctggacgggccgctggaagtgaccaggcccggcaaggtccgcgatttggcggagattcgttcaagccgcacgttgcgcgtcttggtcaaccagagccgtaacagttccggtgaggtacaaggccaggccatcggtgtcgaataccatcgcctgcgcgccttcgagcagtacctcaatggccatgcccgtgatggccaggaaatcaacctgaagatcattcccaaggccaaggaccagttgctcggcgcgctggcccgtggcgaaggcgatttggtggcgcccggtgaactgctcgatgtaaaggcggtgcacaagatcagcaccagcgacccgattgccagcgatgtgccgttgtggctggtgggggtgaagggcgagcgacggtttaccaagctggagcaactgtccggccgtaccctggcactgaccaccggcagtgcggcggcggatgccatcagccaggtcaaccagaagctcgccctgcacaagcagccgccggtcaaagtagagtgggtcgacccaacgctggctgtggaagatgtactggagatggttcaggccggtattttccacctgaccattgtcgaaaagccgattgccgagcgctggtcgaagatcctgcccaagttgcgtttcgataagcaggtggcgatcagcgagccgggcgacgaatactggttcgtgcgccaggatgcctcgatgctgcgggccagcattgaccgattcctcaagacctatcgaaccccgtccgaccaggatgtggcgttccagcgtatctaccgtcgcctttatcaagtgcgcaacccattggcccgcgtcgaccgacagcgcctggaaaaactacgcccggtcttgcagaaacacgcccgcgagcagggtatggactggttgaacctcgccgcactggccttcaaggaatcggcgcttgaccctggcgcgcgcaacagtggcggccccaccggcctgatgcagatcacgccatcggcggcgcaacgcgtgggggtcaacaatatcgaaagtctcgacagcaacgtgcaggccggcgcgcggtacctggcaatgatccgtcgcaagttcttcgccagccccaagctcaacgagcgcgagcgcatggcctttgtgctggcggcttacaacatggggccggagcgggtccagggcatgcgtactgaagccaagcggcggggactcaaccccaaccagtggttcttccaggttgaacgcattgccatggagcaagtagggatgggcggcgtcagctatgttaatagcgtcaacaagtacttcttggcgttcgatcgggagcgagcgtcccttgaaccgcaggcaccgaaaatcgcctcacgaaagtaatcgattttatcgatattaatcaggcattttttcggcttttatcattgtctaaactgattaatatagcggccaaccaacccctactttgaaaaggatttgcaccatgagcccactgatcaaaagcattctgtccacccgcgccggttacggcctgactatcctgcgcattgtggttggcatcatcttcgccgcccacggatcgcaaaaactctttggctggttcggcggctatggcctggcgggcactgcccagtggatggaaagcattggtctggcaccgggtacgttgatggcgctgctgtcgggcggtaccgagttctttgccggcctggcgctgatcattggcctgctggttcgcccggcagcattgggcctgaccatcctgtcgctggtggcgatcttctcggtgcacatccataacggcctgttcatggccaacaacggttatgagttcgcactggccttgctcggtggctccctggcggtactactggaaggtgctggcaaactgtccgcagaccgcgccatcgcccactgattgtgctgcaacaccttgaatcggcccgccctgtgcgggccttttcgttgctccggattcttgacaccgccccaccggcttctctaggatgccgttcatgcgccgatttaaacagctaattgcggggcgccatgggtgatcgttatcggtcccgacaggagcgtatttcatgcttcgaaattccgctaaagcgctggttcggtgttgcctctcacctgcccgcagacttttgaggcagagacacgacacgatgaatgcactacgccccctgatacgcctggccccgatcaccgcggaccttactcaacgcaacccgaaaattcttcttggcggcaagcaccagccgacgctattgcgttacctggacggttggccgcgtcgcactggccgaccgtcagcgttcctgatccagtttgttgaagatggcgattcacttgcgcgttttgccagcaacagctttgaccttgcggttatccaggcaccaagcgccaacaatgccaccgaggtcatccgccaattaacccgtattgcacgacaggggctgatagcccgtcgctgaaccttcagtgaatcgtgccgccggcttgcaaccggcgtcggcgctctccaagaaagaccatccaggcgatcaggcataacgtcagcggcatggcaaagatcgccaccagcgttatcgccaactccagatgacgcacttgggcgtaggcttcgcgctgcagggtatgcagctccatgggtaggcgcagacgttccttgttgagtgcttgcagctgggtattggtctccaccgcctgggtgccgagggtggttgtccatgggctcagccgttgccattcctgctctgttcgttgcaagcgtcgctccagttcgctggctttcgaacgataggcctgtcttgcgacctcacgcataccctccagcaccgtcggcggcctttcctgcgttgccctggggcgaatcgcgacgagcatgtcgggggcggacaggttatccagtgtattcagaacaaacagcgcgttgccatcgggcgctgcgtcgctgaccttatcggtaagcatgtccgtatcagcgatgaccacaacatgaatctgcgccgctgtctgcaacccggacggcaggcccttgataccatcgggaaaaactgaatagctcggcccttcgatgcgtgcagcaatgacatggcgctgctcccggctcgaagcctcttcaatcaaggaattgggtgtggttgcgcgagtggattggttggcatccaacagcaccgattgctcggaactttgcaggatcggggtgaaggttgtgcggcttttgttcaactgcgcgagcgtcccactgctcgatacggtcaccctgttgaggttccaggtgctgatgtcgttcaggttcatcgcctgtcgtggcaagttcagcctgactcgattgggcatatcaggcgtctcccagggcgtgtagagagcgtcgaccaccagcttgtccgtcggcatctggataccccaggcggcaagcacctcgtccagtcggctattggctgggagtgggtttgagcgttgttcgctcaaagggtcgatgaacatcatcaatctaccgcccctcaagacaaattgctcaatcccatacaaggtacgttccggcaacatccgtggctgtacaaccatcagggttttgatgtgttcggggatttgagcggcattcggctccagagcgaacagttcgaattctcgccgcaccgcctgcaagagccgacctgcggattcgtccatcgccagccccgacagcagcccaacaaccggtcgctccgggtgctgcaacttgtagagcaggtggcttatttcatattcgagcaacggctcgcgctcgaggctgaaagaaccgatacggcgcacgccatgaccggggctcgtgctgatgagcccgagaaaccctgtgttttcgtcgagccctgacagccttgctttataggcgtcttccgaatagggagcgggttcaatcacgtgcaggttgatcatgccctgagccttcttttcgtactccttgagcagatcctcaatacgtttgccatagcgtttcacggcgtagcttcgtttcgggtcgttatttgaattgaagtaatacacgtccaccgggctttccagcgttgcaagtagtgggtagacggggggcgataaagtgtggattttttgttgagaaagatcccaccgtatatcaggaagtttacctatccacaccaggttgaaagccaggaaaagcaaaaaggtgacgcatagcgtcataccggtgcgcagagtggaccgcattaagggtttcccttctcatctgtgtttgtagttgagcgtgactgtcgttgcggtgagaaaggtgaggatcatgctgataaaataaagtgtgtcgcgcagtgtgagttttccatcatcgatactgctgaatcgccaagtagggctgagggatgccaggctgtcgatcagccatataggggtttggtgttcaagtgagtccaatacataagaaaggccactggctgtcagtaacaagctcagcgtcaatacgaaaatgacagtgcgctgatgcaccagtgcgcaaataaaacagcctgcggataagtaactgcctgccagcagccaactcgccaaaaattgcgaggcaatgacaccgttgtcggccttgcccagatagttcgcaatgatcaccagagggaacattagaaacaggccggtgctggccaccagccaggcggcgaggaattttccgacaatccattcgaacgttgtgatgggcagggttttcatcaggctgaaaaaacctgcgttggtttcatcggaccagagttgagtggtcagggcggggatcagcaataagtacagcgaagggtggaaccggaaaaatacctgtaagtcactgccgttttgttcctgccacggacttacgtacaaccctaatgtcactgagagtatcaggaagatggcaatgttgaggtaagtgccgggggagcgcgcatagctggtgagttgacgcctcagaatgatgggcaatagtctcaatgggacgcctctttggtcagatggtggaccacatcattcaggcgacctggctccaggttcagtgagttgattttccagcgccggctggcaatcagcgtgttgatatggggatagatggtgtgtccgggcatggcgagaaccgtcactgtgccgggcgcgtttcgatgctcttcaatgcctgccacacctggcaggacagccagtgccaacaggtccagtggcgtctcggcagtaagggtgactgcctggaagtgacgcgagtcgcgctgtagatcgggcagtggcgtatcggccaccaggcgaccgttggcaatgaccagggcacgtgtgcacagttcggacaactcttcgcagtgacgcgaggcaatgatgaccgtcatttcttgcgttaacgattggataagcgccttgaatgcgtgcttctgatcctgcgcgagtccttcggtgggctcgtccagcagtaacagggcagggccatgcaggatggcctgggcaattgcgactttgcgtttccaggcgatggaaaggaggtcgaggggggcatcgagtaccgggaacaactccagtcgtgcgacggactgttccaggcggtcacgtttttcggtaccgcgaaagccacgaatggcagcaatgaaatcgaggaacgctttgacggacatcgtcggatgaccgaggtcgttggacagttgatagccgaccagttgccttgcttcgagcgggtgggtttgtgtgtcgaagccgtgaatttttatatgaccgctggacggctgtgtcgaaccggcaatgacatcgagcagtactgttttggccgtgtgatcttgtccgaacaacccgaggcatgcttgttgaccggcactgaatgaaaagtcgcggacaatcgtattgttacccatgtgttttgtcagattgcttacttcgatcattgttttaccgaataagtttggtatgacgtagggaagctgaaaaaagggtacgggttactctcgcttttgggaacgtcggtcagcattaataagagaagtcctacgtgcagggcgggcagaccactgaaacaatgtgtcgtgtcttggagtgtctaatttttgaatgtttatttgttttttatataaactttctttccaaataatgaggcctgattgcatgatgctgctacgtacccttgttcttgagcgaaatggtcaagatgctccggttaacggtgctctgctctgtgggtttgctgtcggtcagacggcctcaaactttcttgtttacagcctggatgaagagatagaacctggaagttccagggtctatattgcggccttgcgtaaaaaacttgaccggtattttctgggaggcgtcgaatccaaggaagacctgcaggtggcattgcatgttttcaagcaaatactgacattagccgcttcgggcgttaaacccggtggtgttaccgaaacccaggtgccttatcattttgtcgatttaaaaggttgcaagttgccacctgccaggcctgaggatcatcactcggtgatcatcaaaaaagcgctggtgatgaaagtgatcaccctgggcatgtctgcgccgacgttgccggctatcgaaagtgcttcagtgatcgtgccgtccattcgtttttcgtcacagatgatttcccctcccagggtggcgagcccctccgagtcgctccgcttaccgtcgcatgagcaaccgcttgaggagccccgacaggtgccctcgggcgcgccggtggacatagcacaggcctcacctgctatctcgcgcgaacccgatgcgccggtgccaacgaaacccgcgccttcagataatcacggtacattgttcgaagtagacagcacgctgaccaaccttgcccgtgtcgctcaagaattgacgcagcaaaaactcgctgcaatcgagcgggagactgcacttgagcagtggcaggcgcgactgcagcaggaacaaaaccaactggatgaaaaggttcgagagctggagcagcgcaccactcaactgcatgatcagtcgcttgcagtcagccagaggaccgaagccttgaaggtgatgacgtcacaagtctcgggcttgcggcagagtttgcgcggcctgttgctggagctggatcgcacgctggacaactagaccggcctggctactttcaccggttcatttatcatcaacgccagccagccgaacccagggcatgaaaccctggcgtatcggcacctatggacattgcctggggatgcaagcgtttgagtaccaagctgattaccaaagaaggccatgaagcgctgaaaaaggagctggattacctgtggcgcgaaaagcgcccggacaccacgcgcaaagtgacgtgggcggcttcgctgggggatcgcagcgaaaacgccgactaccagtacaacaagaaattgttgcgtgagatcgaccgtcgcgtgcgctacctgcgcaaacgcctggaagatatgcgcgtggtggagtacatgcccgagcaagagggcaaggtgtttttcggcgcctgggtggatatcgaaaatgagcagggtgaaaccaagcgttttcgtattgtcggctatgacgagatttatgaccggatggactacatatccatcgattcgcccatggcccgtgcgctgttgcgcaaggaggtggatgacgaggctatcgtgcagacgccaagcggtgacgtgtgctggtggatcaccgggatcgaatatgtgaagtgagcaaaatgggcccgtattctgtaaggaatgcgggcccatcgcgtttcaaccttcgcgcaacaccgtcagcgggctggcattcagcgcgcggcgggtgccgaacacaccggcaccgccgatcagcacggcaccgatcaccgggagcagcaacagccacgggtgagggtgccaggccaggtcaaatgcgtagcggtacagcacgaacgtcaccagctccgtgcccagcgcggccagcaacccactgacggcacccagcaaaccgaactcgatacgcctggccttgaccagcagcttgcgttcggcgcccagtgcgcgcaacagcgcgccctggcggatacgttcgtccagggtggcttgcaggccggagaacaacaccgtcatccccgccgccagcacaaacagcagtacatactccactgcgagggtcacttgggcgaggatgctgcgcaactgctccagcagcgcctcgacctgcaggatggtcaccgccgggaacgcgcgtgacaggtcgacgatctgctggtcatgcccgggtgccagatagaagctggtcaggtaggtggccggcaggtccttcaaggtatccggttggaaaatcatgaagaagttgggctggaagttatcccagttgatcgtgcgcaggctggtgacccgcgcttctcgattctctccgcccacggtgaataccaagtggtcgtcgagcttgagcttgaggctctccgctaccttggcttctaccgagacacccgggatttcatcggtaggttgcgacgaccaccacgagcccgccgtcagggcgttgcctggtggcaggtcggcggcccaggtcaggctcaggtcgcgttgcaccgcacggtcgccgctggagtccttgctgacgatttcctgtaccggttcgccattgatactgatcaggcgccccggcaccaccgggtacagtggtgcggattgcgcctgcagttccagcagacgggtgccaaaggcatccttgtcggccggcaggatgttcaaggcgaaatagttcggtgcatccttgggcagctggttttgccaggtgtcgagcagctcgccgcgcaacagtgcgatcaaacccatggacagcaggatcaagccaaacgccagggattggccggccgccgccagtgggtggcgcagcaactggcccaggcctaggcgccaaggcagggaggcacgggccagcaggcggcgcaggctttgcagcaacagcaggagcaaaccaccgagtaccagcgcagccaccacgccgccaccgagcagggcgaaggtcagcaccaggtcgaggctcaggcgccacatgatcaggcccaaggcgaacagtgccgcgccgtagaccatccaggtgctggaagggatcggcagcaggtcacggcgcaacacccgcagcggtggcactcgacccaatgcggccaacggcggcagggcgaaaccggcgagggcgaccaacccggtgccgatcccggcaaccgccggtagcagcccgccgggtggaacgtctgcgggcaacaggtcgtggagaaagtagaacaggccaaactgcgccagccagcccagcagggcgccgaccaggctggcgaaaagccccaggacgctcagttgcaggctgaacagcaacatagcttcacgtcgtgacaagcccaggcagcgcagcaatgcactggcgtcgaaacgtcgagtggcgaagcgattggccgacaacgccaccgccacacccgccagcaacacggcgaccaggctggccatgttcaggtagcgttctgccttacccagggcgccgccgatttgctggttgccgtcccgtgaatcctgcaggcgctggttggcggcgagccccggcttgatcaggtcacgataggtctgcaacacggtgctgccctgcggcccgcgccatagttcgcggtagctgacgcggctgccgggctgcaccacaccggtggcgtccaggtccgccaggttgatcatcaccctgggcgtgaggctgtagaagttgccggcgcggtccggctcataggtgagcacgcgggccaggcgcagggtcttcatgcccacatcgatgctgtcgccgaccttgaggtccagcgccgtcagcagccgcgcttccacccaggcttcaccgggtttcgggccaccccctggggtttcatcggcaaaaggcgcggctgcgcttttcagttcaccgcgcaatgggtactgctcgttgaccgccttgatgctggaaagctggatgccattatcggtggcgatgacgctggagaactccacgacgcgggcgtgatccaggccaagttcggtgccggaccggatctgctcggggcgggctggcgagctgccttcaagcaccaggtcggcgccgaggaattcggtggcgcgcaacaacatcgcaccgttgaggcgcgcgccgaagtaaccgatggcggtgctggcggcgactgccaccaacagggcgaagaacaacacgcgcaattcaccggcgcgggcatcgcgcattaattggcgcatggccaggctgaacaggcgcaacagcggcaaacgtgccatcaaggctccaggggcgcgaccatcaggccggcttcaaggcggatcaggcgtcggcaacgatgggccaggcgctcgtcgtgggtgaccagcaccagggtcgtgccgctctccttgttgagttcgaacagcaggtcgctgatgcgctcgccggtgtggctgtcgaggttgccggtgggttcatcggcaaacagcacgtccggttcggcggcaaaggcgcgggcaatcgctacccgttgctgttcgccaccggagagttggcgtggcgaatgggtcaggcgttggcccaggcctacgcgctccagcaggtgcctggcacgctcgcgggcgtctttgcggccgtccagctccagcggcagcatgacgttttccagggcgttgaggctgtcgagcaattggaaggattggaatacaaaacccacatgctcggcacggatgcgcgcgcgctggtcttcatcgagggtactgagggcttgcccggcgagggtgacttcgccgctgctgggcaggtcgaggccggccagcaggccgaggagggtggatttgccggaaccggagctgccgacgatagccaggctatcgcccttgttcagttccaggctcagttcgtgcaggatagtcagttcaccttccgcgctgggaaccactttgctaaggttccgcgcggtgagaatgcttgcgcccatggagaatccgatgcgaatgtggtttttgagtgctggcctggccttgatgtgcatggcccagaacgcagcggcgggtacagtcctgatcgttggcgatagtatcagtgccggtttcggcctggataccagcaaagggtgggtggccctgctgcagcaacggctcaagcaggaaggtttcgacgataaagtagtcaatgcctccatcagtggcgacaccagtgccggaggcctggcgcggctgccggcggcgcttgcagagcacaagccggatgtggtggtcattgagttggggggcaatgatggcctgcgcgggcaaccgcctgcgcaattgcaacaaaatcttgcatcgatgattgaccagtccaaggccggtggcgccaaggtgttgttgttggggatgcagttgccgcccaattatggcccgcgatacaccaccgcatttgccgaagtctatggcgagctggccaagcaaaaaaatgtcccgctggtgccgtttttcctcgatggcgtgggcggtcacccggagctgatgcaggctgatcaacttcacccggcggtcggcgcccagggcaagttgctggaaaatgtctggccgacgctaaaaccgctgctatgacgcttttctaccggcaggctttcggctaaggtggcgcccccccgatttggagcccctgatgtcgcgtcctgcctggtccctgtttaactaccaactgatcgagccggacgagcagctggatctgttcgcctgccaggaagtgcgggtgcatctggtggcgcgtcaactggaactgggcggctctatcgatcgcacgctgtgcggcaccctattgccggcgcaaccgcgttggtcgcgggtcgatcgttcgattttccaggaccagcgcctgtgcccgctgtgccgtgccatcctggagtcgcagaagcgcggcacgccgccgatctggccggagctgcgtttcgagttgtagggggcagctagaagcgcgcttcacgtatacaatcgatgtttacctacccgtcgtctgcgaaggatttaccggatgttgtcgcgcctttccgtcgtcacctgctgcctgtctctcgctgcgctttgtgcggccggttctgcgtcagctttgcagttgcctttgcccccaccgggtgaagacatcgtcggccaggtccaggtgatcaaggccaagtacgaagacacctttgccgacctgggcaccacctatgacctgggctactcggagatggtcgcggccaacccgggcgtggatgcctggttgccgggcgcgggcaccgagatcgtattgccgacgcgtttcatcctgccgccggggcctcgcgaaggcatcgtgatcaacctggcggaataccggctctattactaccccaagggtcagaacgtggtctacacgttcccgttggggattggtcgtgaaggctggggttcacccatcgcccataccagcatcattgccaagacgccaaaccctacctggaccccgcccgcctcgatcaaggccgagcacgccgccaatggtgacccgctgcccaacgtggtgccggccggcccggacaacccactgggtccgttcaagttcaccctgggcacgccgggttatctgatccacggttccaacatgaagtttggtatcggcacgcgtacaagccacggctgcttccgcatgttcaacaacaatgtgctggagatggccggcatggtgccggtggggacatcggtgcgtatcatcaacgatgcctacaagttcggcagcagcggcggcaaggtgtaccttgaagcgcatacgccgttgaatgatgacggtacgccgtcggtggtcgacaagcacaccgcggtgatcaacgccttgctcaagcgtgaagacctggcgaacaatttgcgggtcaactgggaccaggtgcgtgacgtggtcgcggcggaagatggtttgccgacggaaatcggtgtgcccggcgcagcgtcggttgccgccagcgcgccgatcgatctgcagcaataaggcgcgacatcaaacgcccgccaaggccttgcgccagggcgggctttttattgcgcgtgattcaggcacaaatcccaggcaataaaaaagccgacccataaatggatcggcttgataacaaccccgagggattattacttgcggctagctttttcaagcatgcgcagagcgcgctcgttagcttcgtcagcagtctgttgtgctttttgagcagcagccagagcttcatcagctttacggtaggcttcgtctgcacgggcctgggagcgagctgctgcgtcttcagttgcagtcagacgagcttcggtttctttggagacgctgctgcaaccggtagccagaactgcggccagagccagagcagagaatttcagaacgttgttcatcgtgttccccttcaaggactttctattagatggctagtatctcagagtgagccaatagccggcgtacatactacccattacttgtagtaagtaaactgacgtagcgcaagaagcaaaaaaaattctcgtgccgaatctattttggctaatcttttggagttttgtataaaaactgtccaatttttttaaccaggcgtaaatcggatccaggctgaaagggccggcccgcatgtgttaagccctgtaaacagatgaaattttatatatccacgccgacacttacgttcagcatggcttcgcgttgcccggtatcttttgcgcatgtagaggtgactttaagagcgcctgttcgtctcaaggttcaactgccggcaatgttcaggcgttcgatcatcggtagatcgaagccctttctatatccacccgtggcaggggatgacgagtgcgccttgagcaattgcaggattggtgcctactattccctacgtgcaggtgtgagcgctcagggttttctcgttgtcgaaaccggcacggggtggcgtagatgttccttcgccggaaaaacatcggtaaggtaggggtcagaatccaagacccgcgaggagtagtgatgagcgaggcgttgtccatccaccatgaccaggctggtcatcagttcgagaccaatgtggacggtcatcgtgcctatctgacctatatggatctcggcaaacagaccctggatatctatcggaccttcgtgcccaacgcactgcggggccgtggtattgcggcggcactgaccgaggaagccttgaagtttgccgaggaggcgggctacacggtgatcccgtcctgctcctatgtcgaacgctacatggagcgccaccagcgccatgccgcgaagttgtaaggcacaaatagcagcatgaaaaacgccgggctcagcccggcgtttttgtgtgcgctctataacagactcaggtgcgcttgcgcttaggcagcacgtccttgagcttggcgtgcatgctgcgcagtgtattttcggtggcggcccagtcgatgcaggcatcggtgatcgacacgccgtactgcaagtcggccaggtcttttggaatcgcctggcaaccccagttcaggtggctctcgaccatcagcccgatgatcgactggttgccttcgagaatctggttggcgacgttttccatcaccagtggctgcagggccgggtccttgttggaattggcgtggctgcaatcgaccatgatgttcggcttgatcttggccttgttcaatgcctgctcgcacagcgcaacgctgaccgaatcatagttgggcttgccgttgccgccgcgcagtaccacgtggccgtaggcattgcccttggtggtgacgatggacacgccaccttcctggttgatacccaggaaacggtgcgggctggaaaccgattgcagcgcgttgatcgccacagtcaggccgccgtcggtgccgttcttgaaacccacggccgaggacaggccggacgccatttcacggtgcgtttgggattcagtggtgcgtgcgccgatggccgaccagctgatcaggtcctgcaggtattgcggggagatcgggtccagggcttcggtggcggtgggcaggcccatctcggccaggtccagcagcaactggcgaccaatgtgcaggccgtcctggatcttgaacgagtcgtccaggtacgggtcgttgatcaagcctttccagccgaccgtggtgcgcggtttttcgaaatagacgcgcatcaccaggtacagggtgtcggacacttccgccgccagcaccttgaggcgctcggcgtactcgtgggcagccttgagatcgtggatcgagcaaggcccgatgacgacgaacaggcggtggtcggtgccatcgagaatgtcacggatgacttcgcggcccttggtgacggtctgcagggcagcgtcgctcaaagggatttcgcgcttgagctgatcgggcgtgatcagggtctcgttggattcaacgtttaggtcattgatcggtaaatcagccatcgtgttactcgtcagggtcacgggtgccggccgccagccatccccgtgcggcggagcacagcatgatttgaatgcaggggggaggaaccttagcgcgtaacaccggcccgcgacaatgggcaaagcccgctttaatccagtgctggcgccacaaaggcttcgtgggagaactcgctggcatggcgcgatacccactcacgggccagggcttcgagttgctggggtgtcggttcggtgtcttcgtgctggcggcagtagcgctctatccggcatgcttgctcacccatgcgtgcaccgaacaacgcatgttcatcggtaaacgagacaccgacgcggtagccgttttccaccttgcggcaccacgccacatagcctggataacgtgcgctggcacccagggacgggatatgcagatcaaccgccgtgccttcgcgccaggcgcgtggccaatggcaggcgatgccgcccaggccgatagcgtgcaggcgttggcgagggatggcgggagagggacgttggattaactcgacagcgacatcatcagggtgaggtaaaaaacgacccatgtacacggactccgagcaccgtccaattgacggcggtggcagcagtatagtgaaggaactggaattgaccgacctggatattgaccagcaattgctgggattgccaggtatttctctggtgatctttaccagcgcagggtgttccagttgccgctgggcacgccagcaagtgccgggctggccgttaccggtggaccggctgtgctgggtggacgccgggcacaacggtggtgcggtcgaacgctaccagatctttcatttgccggcgctgttcgtggtgtgcgagggtcaattccttgggcaaatacagacacgtcttacgcgtgacgacgttttcgatgccgtaaaacaggcactcacccgtccaactgaggatttgccatgacagcagttacaccccagccaccacgcattggcatcatcggcaccggtgccattggtggtttctacggcctgatgctcgcccgcgccggtttcgatgtgcactttttgttgcgcagcgaatacgcggcggtcagcgagcacggcctgcacttgaacagcaccgtgcacggcgtatcgcatctgcatcccgtgcaggcctacgcccgcgctgctgatatgccgccatgcgactggctgctggtgggcaccaagtcgaccggcaacgtcgaattggccccgaccctcgcccaggtggcggcgccggatgccaaggtggtgttgctgcaaaacggccttgatgtggaagacagtctgcgtgaacacttgccggcgtcgctgcacttgcttggtggcctgtgttatatcggcgtgcaccgttctggtccgggcgttatcgagcaccaggcgttgggccgggtcaatctggggtatcacagtggcaccgcggccaatgatgacgcccgccaaaaggagattgtcgacgcaggcgccgcgttgtttcaccaggccggtatcgagtcgcaggccatggccaatgtgcatctggcacgctggcacaagctggtgtggaacgtgccttacaatggcctgtcggtgttattgggcgcggggacctcggcgatgatggcggacgaatccagccgcgaactgatccaggcgctgatggccgaagtggtgcagggtgcccacgcctgtggtcatgagattccccaaagctacgccgagcagatgtttaccctgactgaaaccatggacgattacctgccgagcatgtaccacgaccacgtgcacaaacgcgcgctggaactggcggcgatctacgcccgcccacttgctgcggccagggctgccggctgtgagctgccacggatgcaggcgctgtatcaggccttgagttttattgatcggcgtaaccgctgagcagggggacacaccatggcaaagggattgggcgacaaactggtgctggcgatttcgtcgcgggcactgttcgacctcagcgacagccacaagatctacctcgcccaaggcgtcgaggcgtaccgcaagtaccagatcgagcacgaggaggaaatcctcgaacccggcgatgcatttccgctggtcaagaaactgctgagcctgaacgccagcctgggccgtgcgcgggttgaagtggtgctggtgtcgcgtaacagcgctgacaccggcttgcgcgtgttcaattcgatccagcattacggcctggatatttcccgtgccgctttcgtaggcggtcgtagcccttatccttatttggcggcgtttggctgccacctgtttctttcgacccatgccgaggatgtacgcagtgccctcgatgcggggttcgcggcggcgacgattctgtcgggcggcccgaaccgcgcatccagcgaagaactgcgcattgccttcgacggcgacgctgtactgttttccgatgagtcagaacgtgtgtaccaggccggtggcctggccgcgttccaggccaatgagcgagaggcggcgcgccaaccgttgcacggcggtcctttcaagggttttctggcggcactcaacttgttgcagcgcgagtttcccgatgaggcctgtccgatccgcaccgccttggtcactgcccgttcggcgccgtcacacgagcgggtgattcgcaccttacgtgaatgggatatccgcctggacgagtcgttgttccttggcggcctggagaaatctgcattcctggaggcgtttgccgccgatgtgtttttcgatgaccaggccgggcattgcgagaaagccatggaatttgtcgccaccgggcacgtgccccatggcatcagtaatgaggtgaagatctagggcgctgctaagctgatttcatctccgccatcctggcagtccaggaggttctatgatccgttcgatgctgtacgccacggacctcggtctgtacgcgccttatgtgatgcaacatgcgctggcgctggctcgaacgttcaaggctgacctgtatgtgattcatgtggtcgagcccatcggcctgttcgccgaatcggtgttgcagagctaccttgatgagaaggccttgagtgagtggcaaagccaggggctggctacggtcatggcgacgatcgaacagcgggtgctggacagttttcgcgaagagttgggggacgaggggcaggacctgaagttgattcgctcggtacgggtgatccagggggacccctgcgaggtgatactcgaccaactgcgcaaactttccgtggatctgctgatcgtaggaagtcacagccatgcaaccgcggcggctaccccgttgggtcgtaccgctgcacgggtgctgcagctgtctacggtgccggtctacctggtgccttcgttgcaacgtcgacgcagtgatgacgtgtgatggatgaaaatcgataaaaagttctagatttatccataaaacctttaatatagttatataccgtcgctgatacccgtggcgtctatctgctttgagggacacatatgaagcttcaacaactgcgctacatctgggaagtggcgcaccacgacctcaacgtttccgctaccgctcaaagcctctacacctcgcaacccggtatcagcaagcagatccgcctgctcgaagacgagttgggcgtcgaagtgttcgcgcgcagcggcaagcacctcacccgtgtcaccccggccggtgagcgcatcatcaccaccgccggcgagatcctgcgcaaagtcgaaagcatcaagcagatcgcccaggaattctccaacgagaagaaaggcaccctgtccatcgccaccacccacacccaggcacgttacgcattgccgccggtgatccgcgatttcatcaagcagtacccggatgtggccctgcacatgcaccagggttcgccgatgcagatcgccgaaatggccgctgacggcaccgtcgatttcgccattgccaccgaggctcttgagctgttcggcgacctggtgatgatgccgtgctaccgctggaaccgttgtgtggttgtaccgcaaggtcaccccttggccaagctgccgaagctgaccctggaagccctggccgaatacccgatcgtgacctacgtgttcggtttcaccggccgttccaagctcgacgaagccttcagtcatcgtggcctcacgccgaaagtggtgttcactgccgccgacgccgacgtgatcaagacttatgtacgcctgggcctgggcgtgggcatcgtcgccaagatggcggtcgacacggccctcgacaaagacctggtggtgctcgatgccagcgagctgttcgagtccagcgtgaccaagatcggcttccgtcgtggcaccttcctgcgtggcttcatgtgcgatttcatcgagaagtttgcgccgcacctgacccgtgaagtcatggccaaggcgatccagtgccacaacaagcaggagctggaagaactgttcgacggcgttgaattgcccgtccattaagccagcggtttatttggcctcggtaaccgtaaaatgttgccgggcgcctgccaccagaatctccacctcatcgccttcgaacttgcccagcaggcttttgcccagtggtgagcgcggggtgatgacggtcaacggttgtccaaccacgtcaaccttcaaaccggccgcatccggcgccaggaacagccattgctggcgactgctctcatcttccaggcccagcagggtgccgacttctataccgcgctgatcatcgtaggcccgtaatggctggttctggcacagcgccaacgcctgcttgatctcctcgacgcgcttggcttgcccggccgccaggtaggatgcctccagcccgagggtgtcgtacttgttttcagcgatgttttcttcgtgggtcgcggtttcgtaggcggtctgcgcggcgcgctgggcgatgtcgaggtcgacgctgagcttttccaggatgagcaggtggacggcgtgtttattcatggtcatcaatcgcagaattgcaggacattggcccgggtcttttcgttgggagcgttctggtcctgttgcagccagaactggcatttggggttggacaggttgcgcgcattgttgcgcgcctggtccaggctctgttgctgctcctgtttctgcaggttctgctgatactgctcgaacatgcgattcggcagttcaggcgcggccaccgcaggcttgcccaattgctgcactgcctgggccaccggcgccaggctctgggggaacaggtagcgcgacgccagccaggtggtcagcacgatggcgataaaccccagccatacgccaaacgagatagcggcactgagcttgaacagcgacaacggacgatcagacatgaggccctcctggcaggcattgacggcgtggcggcgattgtcgcacagccaccgtgcagaataatcgtgatcaagccttctgcatccgcacatttatgcggacaatcgaacctttgagcgttggagcccggaatgaaagcccgctgggatattttttgcagcgtcgtcgacaacttcggcgacatcggcgtgacctggcgcctagcccggcaactggtggcggaacacgcctgtgatgtgcgcttatgggttgacgacctgcgcgcattcgaacgcatgtgccctgagattgatgtgcagctcgatcaacaatggcaggaaggcgtcgaagtgcgtcattggccggccgagtgggtgggcgcgcccgcggcggatgtggtgatcgccgcgtttgcctgccagttgccgcctgagtatatggaggccatggccgagcgtgaacgcacgccggtgtggatgaacctggattacctgagtgccgaggaatgggtcgtgggttgccaccggctgccgtcggtgaagttcaagggcgtgcagaagtacttcttcttccccggattccgccccggcaccggcggccttttgcgtgaggccgggttgctggaacagcgtcgggcttttcagcaggatgcgagtgcgcagcaagacttcctgcaaaccttgggtgtgtttcccacagccggtgcgcggctgatctcactgtttgcctacgaaaacgccgggctcgccagttggttggacgagttatcgacggacgggcgtgccactcatctattggtgccggaggggcgcattctgggcgatgtgcagcgctggctgggtctggatcggctggtggcgggggatatccaccagcgcggctcgctgaccgtgcaggtcatcgctttcgtgcgccaggaacaatacgaccgcctgctgtggtgctgtgacttcaatgccgtgcgcggcgaagactcgttcgtgcgcgcccagtgggccggtcgcccgctgctgtggcatatctatcgacaggacgaagatattcacctcgacaaactcgatgcctttctggatctgtacaccgccggtttgtcacccgctgcaaggcaggcgttgatcgggctctggcaagcctggaacacggagggcgatatggcccaaccgtggaaaatgctgctggaacattggccggaggtcagccagcatgccgaaacatggtgtctggaacagggcttgcaggccgatcttgcgacggcgctggtgaagttttatgaaagttggatatgatacgccaccttgaattttgtaaatcccatccaaatttcggatatatgcaatgaaaactggtaaagaactgaaacccggtacagtgatccgtctcgaaaacgacccttggctggttcagaaagctgagttcaccaagtctggtcgtaacagcgccatcatgaagaccaagctgaagaacctgctgaccggttacaagaccgagatcgtctacagcgccgatgacaaactggacgacgtgatcctcgaccgcaaagaagcgaccctgtccttcatcagcggcgacacctacacgttcatggacaccaccgactacaccatgtacgagctgaacgctgaagatatcgaagctgttctgccgttcatcgaagaaggcatggaagacgtctgcgaagctattttcttcgaagagcgcctggtttccgtagagctgccgaccaccatcgtgcgtaaggtggcctacaccgaaggttccgctcgcggcgacacttcgggcaaggtgatgaagcctgccaagctgagcaacggtaccgaactgcaagtggccgatttcatcgaaatcgacgacctgatcgagatcgatacccgcgaaggcggttcgtacaaaggtcgcgccaagaagtaattctggccccgccgctacgaaaaaaagcccgaccttgtgtcgggctttttcgtgggtgctgcctttacttcaggtgttgcttcagttcatccgaggcctgtagcagtgcggagcgtacggccggcacctggctgaccacattgagcaaaccgtagtcgtggatcatgccgttgtagcgcaccgccgtcaccggtacacccgcctggtccagtttgcgagcgtaggcttcgccttcgtcacgcaacacatcggcgccggctgtctggatcagcgcaggcggcaagcctttgagctggtcggtggtggcccgcagcggcgaggcgtagatctcggcgcgctgggtggcgtcggtggtgtagttgtcccagaaccacttcatcatgttgcgggtcaggaagtgcccttcggcgtactggttgtaggacgctgtgtcgaaattggcgtcggtcaccggccatagcaacaattggaacttgatcgccggcgtgcccttgtccttggccatcaggctgaccactgccgccatgttgccgccgacgctgttgcccgcgaccgccaggcgcttgccatcgacattgatctctttaccgtgctcggctacccattttgtggcgccgtaggcctggttgatcgccaccgggtaatgggcttccggcgaaggcgtgtagttgacgaacaccgccactgctcccgaacccaccaccagatcccgcaccaggcgctcatgggtcgggtaatcccccagcacccagccgccaccgtggaagaacatgaacacaggcaatgtgcccttgaccccggctggccgcacgatggtcaggtccagcggcttgccgtcgacctggatggtcttctggctcacatccgccttgggcaaggtcagcttcacaccggcctgggcgccggtcagtacggcacgggcgtccttgggcgtcagttgttccatcggtttgccggtgcctgcgttcaacacatccaggaaggactgggtgttgtgctcgacatcacctgtcgccgcaaaggcgtgggtgatggacaaggcgagcagggtgccggtgagcgctttaccaattgtgttcattgctttctccaggggcggccgagggcatttagacggtcacgtgcaggcgaacatcgacgttgccacgtgtggcgttggagtacgggcagacttggtgagcggcgtcgaccaggctttgcgcgtcgtcctgggccaggcctggcaggctgatgtgcaggtcgatgtccaggccgaaaccgccggggatctggccgatgccaacgtgggcagtgatcgacgcgtcatccgggattttgcgtttggtctggctggcgacgaatttcagggcgccgatgaagcaggccgagtagccggcagcgaacagttgttcggggttggtggcctggccaccggcaccgcccagttctttgggggtggagagtttgacgtcgaggatgttgtcgctggaaacagcacgaccatcacggccgcctgtggcggtggctactgcggtgtagagcgtttgcatggtgttttcctctttgttgttagcgctaaatgtttgcgcgctaagtagttggtgaggcgaatgtatagcgctaatgtttagcgcgcaagataaattttcaaattttttcaaattcaacctgcaggggccggcttggcggctcctgcaaggggagaggtttaaacgctggcttgcaggttggcgcgcaacgcgatcaggtcgctttgcaacttgcgcaattgctccagctccaggccgctggcacccaggatgcactggggaatgcccatggccttgtcttgcaacgcccggcctgcgtcggtcagctccaccaccaccacgcgttcatcttcacggctgcgggtacggctgagtacaccttcggcttccaggcgcttgagcaatggggtgagcgaacccgggtcggtcagcaggcggctgctgatttcgccgacagtcaaaccatcctcttcccacaacaccatcatggccaggtactgcggataggtcaggccaagcgcttgcaacaacggcttgtagaccttggtcatcagcagcgaggtggagtgcagggcgaagcacagctggttatccagcatcagcgattcgcacggatcagggttcttactcatggctgtacctcgaaaaagcatgtctgggctggaatctagcgggcaaatctttaatgcgccagataattctgtccgagcggtcagaccaagccactctgtagcgccaggtcccaaggtggcaccggactgaagcgcgatttcagatattccagcagcagtcggctgcgggcattgggctgctgttccaggcgcagcgcatagatgccggtggtctcgggactgggcaggccgccttcgcagaacaaaggtagcagttcgccgcgcaccaggtattcgctggccagccacgtggggaggtgggcaatgcccagcccggccaaggcgccagacaacaaggcttcagcgttattggcgctcatgcggatgcgctgcggtcgataggtggcacggcgcccatccagctcgaagcgccaggcgaacgtcggcgccaggccatcccagtccaacccgtcatgttcgctcagttcccgagggtggatcggcgtgccccggcttttcagataggccgggctggcgcacgcgatgcgcacgatgctggccaagggcgtggcgatcaaccgcgtgtcgacgagatggccggcgcgcagcactaggtccaccttgcccaggtgcgcgccctgcatatccacaaagctgtcgatcagatgcaggtgcacatccagtcccgggtagacattgaggaaatccgcgatcaccggcgccagatgccgtcgaccaaatgccgctggtgcatcgactcggatgaggccttccggcgcatggctgagggacaccgcttcggcccgcgccagttgcagctcgctgacaatccgccgtgcccgctcggcgaaggccaggcccgccggagtcggcactacggcgtgggtgctgcgctggaacaagcggctgccaaccgagctttccaggctgtcgatccgccgggctactgccgagggcgtcagcggatgacggcgtgcggccgcggagaaactgccggtttccagcacatcgagaaacaggctcagttgatcggtcagaggattggggttcatcgtaacgtcgcttatgcgagattggcacagccattgtgcgttgctgtgcgtttccgcgccagagccgactgcgtagcatgcaaggcctgggattgcggagtaacaagcggtgttggatttagtgatgtacctgatcttgggcgcggccctcggcacggtgggcggcctgtttggcattggcggtgggttgattgcgatcccggtgctgggcgtgttgttcggcctggaccagcaattggcccaaggcaccgccttggtaatggtggtgcccaacgtgatgctggcgctgtggcgctatcaccagcgcaaccgtatcgagctgcgccatgcgttgccgctgggcgtcatgggtttcacgtttgcctggctgggttcgatctgggcggtggggctggatgcgggtgcgatgcgcatcggttttatcgccttcctgttgacgctatccgcctataacctgctgcgcatgttcacccgtaacgcgccgccgacggcgcagatgcgttattcctggccatggcttggggtactgggtgccgcctccgggtccatgggcggtttgtttggcgtaggcggggcagtggtcgcaacgccggtgttgaccagtttgttcggcacaacccaggtggttgcccaaggtttgtccctggccttggcattgccgagcaccggcgtgacattggtcacctacgcctggcaccaggaagtggactggatgatcggcgtgccgtttgccgttggcggcctgctcagcatcagttggggcgtgaaggtcgcccatgcattgccggagcgcgtgctgcgcggtctgttctgcggcttcctggtggtgtgcgcggtgatgctgacttttaaagtttgaatccttcgaggatgtactccgccaggcagtcggtgatgggggaggtcatcgccgggttgcgtagcaatcgaagcgtcatcgatggcagcggcggaaaaccttcttcgctgccgagcacccgcagatcgtcggtcaccaggctttccatgctgaccattaccgccaggccggaactcaccacggcctgaatcgccgccacgttggaactgtggtaggccagtcggtagtcccgccccgcggcgtccagtgccgcacgggtccactgggtgcagaagctgtcgaccccggaaattgccagcggcagcgcgtcgtgttcgtccacgcagaagcacggcgcggccacccacaccatgcgctcggtgcgcagcaactcgccaatttcattgccgggttcgcggctgataacggtcagcgccaggtcccggcgctgcatcaacaccgtcgacgcctcgcagtgcatctcgatctggatcagcggatatgccttggaaaaccgcttgaggatgcctggcaggaaacgcatcacgtagtcgtccggcgtgccgatgcgcaccaacccgaccatgtgcggctcgcgcagggtgttgaacacttcgctgtgcagtttcaggatgcgccgcgcatagcccagcaagacctggccctcgggcgtcagccgcacctgccgaccatcgcgttcgaacaacttgcgctgcaatacgtcttcttccaggcgtttcatctgcatgctcaccgccgattgtgtgcggttgacccgttcgccagcgcgggtaaagccgccctcgtcagcgatggcgacgaaggtgcgcagcacttcagtgtcgatgctcgggtagccggacaattgatcaatctccgagatgcattgcataaaaaacattcgttggattgatcataaggccaggcacacacttgcgccatccccactggagggcgagaagatgaaaggtcaaagaggttttgtattgctggcgaaacgtccgtttgccgggctgtttcacaaggttgcgcgctggcaggcgctgcatgaggagcgccagatgctggcgaccttgagtgatgatgcgctcaaggacatcggcctcaatcgcggcgacgtggagcaggagcgccacctgcatttctggcaagacccgctgcgaaaataatcgcggatgcagtagggtagtcggcgagtccccacggagaaacccatgcccgccgacctgtctttttcactcaagcaagctcgacgcatggcgctggcggcccagggtttttccggacgccaggcgcctgcactgatcaaggctgcgcacctcaaccgcatgatcgagcgcctgggcgtgttgcagatcgattcggtcaatgccgtggtgcgctcccattacctgccgctgttttcccgcttgggcaactactccccgctgatacttgaacaggccgcctggagccaggggcggcggcgttcgctgttcgaatattgggggcatgaggcatcgctgttgccgatggcgctgtacccgctgatgcgctggcgcatggagcgggccaggcaagggcagggcatttattcgcaaatggcacgttttgggcgtgagcaacaggccactattcagcgggtgctgcagaccgtcgagcaacagggcgcgctgggtgccggcagcttgtcgacccgcgaggagcgcgccggcccgtggtgggactggagcgacgaaaagcacgcgttggaatggctgtttgccgctggcctggtcacggtcgccggccggcgcgggttcgagcggctctatgatttgccggagcgggtcattcccggcgatatccttcaaacctctgtgactgaaaccgaggcccagcgcggcttattgctgcacagcgccaccgcgttgggggtcggtactgaaaaagacctgcgtgattacttccgtctcgacccggccgacagtcgcactcgccttgctgaattggtggaagacggtcgattgttgacgtgccaggtacaaagctggaaacaaccggcgtactgcctgcccgatgccaaagtgccgcgcaaagtgccggccagcgccttgttgtcgccatttgattcgctggtctgggagcgcagtcgcaccgagcggctgttcgacttccgttaccggctggagatctataccccgcaagacaagcgggtgtacggctactacgtgctgccgttcctgcacaacgagcggatcgccgcgcgcgtcgacctgcgtgccgaacgcgccaatgggcgcctggcggtgcatgcggtgcacgaagaagagccggggttggatgaggaagggatgttggcgctggcgcagaacctgcggcaaatggccgactggctggggctggagcaggtgcagctcaactgccaaaggcccagtgccgaccggttgcgggcggcgatgatcagcatgggggttggtctttagggcctcatcgggggcaagtcgaatcgtcgcaccgcccctcccacacttgaatgtattcacagatcaaaatgtgggagggggcttgcccccgatgaggccctgaaggcaactgaaaactcagcgtttgacttgcttcaatgtctcggcaatcagaaacgccaactccagcgactgatcggcattcatgcgtgggtcgcagtgggtgtgataacggtccgacaatccatcctcggtgatcggccgcgcgccaccgatgcattcggtgacgttctgcccggtcatctcgatatggatcccgcccgcataggtgccttcggcctggtgcacctggaagaattccttcacctcgcccaggatctgcgcaaagtcgcgggtcttgtagccgctgctggccttgatggtgttgccatgcattgggtccgagctccacagcacttgcttgccctcgcgctgcacggcgcgaatcaggtggggcaggtgatcgccgaccttgccggcgcccatgcgcgcgatcaggttgaggcggccggggtcgttgtccgggttgaggatatcgatcaggcggatcaggtcatccgggttcatgctcggcccgaccttgaccccgatcgggttgttcaccccgcgcaggaactcgacgtgggcaccgtccaactggcgagtgcggtcgccgatccacagcatatgcgccgagcagtcgtagtagtcgttggtcaggctgtcgcggcgcacgaaggcttgttcatagttgagcagcagcgcttcatgggcggtgaagaagctggtctcgcgtagttgcggcgagctgtccatgccgcaggcgcgcatgaaggccagggtttcgtcgatgcggtcggccaactggctgtacttctcggccagcgcggagttggcgatgaaatccaggttccacttgtgcacctggtgcaggtcggcaaaaccgccctgggcaaaggcgcgcagcaggttaagggtggcagtggactggtggtaggactgcagcaggcggtccgggtccggcacgcggcttttttcgtcgaaaccgatgccattgacgatgtcgccacggtaggcgggcagtgtgacaccgtcgatggtttcatcattggccgaacgcggcttggcgaactggcccgccatgcgcccgaccttgaccaccgggcagccggcggcgaaggtcatcacgatagccatttgcagcagcactttgaacgtgtcgcggatttttgcggcggagaactcggcaaagctctcggcgcaatcgccgccttgcagcaggaatgcgcggccctgggtcacctcggcaaactggcggcgcaactcgcgggcctccccggcgaacaccagtggcgggtagctggccaggttctgctccacttgcagcaagtgtgcagcgtccgggtaccggggttgttgctggatcggcagggcgcgccagctgtcggggctccagggttggctcatcatgaactcgattggctgattgacggtggggcgccaatgttatcagcaattagtgcgtgacctgttgccgtcggttggccgacaatcgcgcctttgccgtgcagcaaacccgttaggagtagtgatgaccgaggagcgtgtcgagcgcctgctggccgaagtccatgatgatttcggcatgatccgtgtgctcgaagtggccgattaccgttttctcgagtttggcgacgccatcgagcaaagctgcgtgttcaccgctgatccgagctggctggagtacgactacacccgtgcgatgctgatcggtgcgttgtgtcatgaacaacccgagagcgcgctgttcctcggcctgggcgccggcacgctgacccaggcgtgcctcaagttcctgccgctggaagatgtggaagccatcgaactgcgccccgatgtgccacgtctggccattgagttccttgggctggatgacgacccgcggctgtacatccgcattggcgacgcattgcaattgctggagaccgccgagtcggccgacctgattttcgtcgacctctataccgatgtcggtcccggcgtcgggcatctggcgtggaccttcctggagaactgccagaaaaaactcaaccctggcggttggctggtgatcaaccaatgggccaccgatgatggcaagccgctgggcgcggcattgttgcgcgggttgtatcaccgtcattactgggagctgccggtgaaggagggcaatgtgattttgctggtgccttcggagctggatcaggcgctggatctggaggcactgtccgctcgcgccgaggccctggcatcgaagttggggtattcgttgcagccgttgatcaaggcgattcgcccggcgacctgagctagatgcctttgaatatgccgggtcgcttctcaatcattgcccgcacaccttccttggcatcctcactgttgagcaatttgtccaccatcggcggcaacgcctcagccgccacggcttcgccttccatgcgcgccagccgtgccgacatcaacgtagcctgcacgcccagcggtgcctggcgggcgatgcggttggcgagttcgacggcgcggggcagcaagtcctcgctggccatcacttcctgcaccaggcccaggcgcagggcttcatgggcatcgaattcgtcgccggtgagcagccagcgcatcgcgttgccccagccggcgatctgatgaaggcgcagcgtcgcgccgccgaacggaaagatgccacgctgcacttccatctgcgcaaagcgcgtgttgctcgcacagaggttgatatctgcggccagcatcaactctatcccgatggtcaggcagtagccctgggccgcgacgatcaccggtttgctcacgcgcgggccggcaaacacgccccacggatcacaaccgcccagaggcggctgccagccactggccatcacgctgctgacattggccaggtccagcccggcggtaaagtggtcgccatgggcaaataccacggccacccgagcgtcgtcatttcgatcaaattcgccatacgccaggctcagctcattgagcaggtcgaggtcgaacgcgttgcgtttggccacccggtccagacccaaaagcaagacatgaccctggagttcacggctgacgcggctgctgctggcttgattcatcgggtgtgccctcgggcgcggggaaaggtttcggaccaaaggaccgcaaaggtcaggtgaaccgtttaagcgttatgaccagcagggccgggcctctgaaaaatagaccctggcggtgttatctgcaaagactgtgatgcagcgcggtttatcggtgccttacgataaaaaaagctccctttttcagctatttccggtatagtgcgcgccggcctttaaccgggccgcgtttaggtagcgcaattccccgaagtcagcttcggctgcacgtccgcacagcggactctcccttgacgaatctttttcattcattcgttttcgcaaatccccgccgacaaagcagccagggcgactcttgagtctcaacacggcatgcgcagctttggagcatgggtctttgcggatgcacttagaggcagacccatgacccaggaaaccggcggcttcgccgcttttaatcttaacccgaatattcttgcagcagtcgcagcgaccggctacgaagaaccttcggcgattcagcagcaatcgatcccgatcatcatggccggccaggacatgattggccaggcgcaaaccggtaccggtaaaaccgccgcgttcgccctgcctatcctgcattgcatcgatcctgccaagcgcgaaccgcaagccctgatcctggcgccaactcgtgagttggcgctgcaagtagcaaccgcttttgaaacctacgccaagcaaatgccaggcgtaaccgttgtggccgtttacggcggcgcgcctatgggcccgcaactcaaggcaatccgcaatggcgcacagatcgttgtcgccaccccgggccgtctgtgcgaccacctgcgtcgtgacgagaaagtcctgtcgaccgtgaaccacctggttctggacgaagctgacgaaatgttgaagctgggcttcatggatgacctggaagtcatcttcaaggcactgccaccgacccgtcagactgtattgttctcggccaccctgccgcagtcgatccgtgccattgccgaacgccacctgcgcgatccgcaacacgtgaaaatccagaccaagacccagaccgttaccgcgatcgaacaggctcacctgttggttcacgctgaccagaagacctcggctgtattgagcctgctggaagtcgaagacttcgacgccctgatcatgttcgtgcgcaccaagcaagcgaccctggacctggccagtgccctggaagccaagggctacaaagccgctgcgctgaacggtgacatcgcccagaaccagcgtgagcgcgtgatcgactccctcaaggatggccgcctggacatcgttgtagcgaccgacgttgctgcccgtggcctcgacgttccacgtatcacccacgtgttcaacgttgacatgccatacgacccagagtcctacgtgcaccgtatcggccgtaccggccgtgccggtcgcgaaggtcgtgcactgctgctggtgactccgcgtgagcgccgcatgctgcaagtgatcgagcgtgtgaccggtcagaaagtcgctgaagtgcgcctgccggatgcccaggcagttctcgatgcccgcatcaagaaactgaccaacagcctggcgccactggtggccgacgctgaatcgacccacggcgacctgctggaccgcctgaccgccgacatcggttgcaccccgcgtgccctggctgcagccctgctgcgcaaggcaaccaacggtcaggccctgaccctggcggccatcgagaaagaacgtccactggtgccgaacagcgcgccacgcggtgatcgtccagagcgttccggcgaccgtccagaccgtggtgatcgtgagcgtcgtgctccggttccattggctgaaggccgtgcgcgttgccgtaccgcgctgggcgcgcgtgatggcattgctgccaagaacctgctgggcgctatcctcaatgagggtggcctggcacgtgaagccatcggtcgcatccaggtccgtgacagcttctccctggtggagctgcctgaagacggtctggaaaaactgctgaccaagctgaaagacactcgcgttgccggtaagcagctcaaactgcgtcgctaccgcgaagattgatccgcccttgggctgattgatcgcaagtaaaaaatccccgactggttcggggattttttttgcctgaaacttaccttagccgaagcggtagatgtccatgcccagcgcgcccatggtgaatccctggtgtgccacgctgaattcgccaccggcacctcgtgcaaagtacagcggcagcaagtgttcatcgctgggatggctgcgcacggcattcggtgccaggcggcgatagtcgtgcagcgcggtttcatcgttggctgccagcttatccaccacccaatcgcggaaatcccgcgcccatggctcgatgctctccggtcccgcgtgccagtccaactcgcccaggttgtgggtgatgctgccagagccaatcaacaacacaccttgctcacgcaggcccgcaagagcatgcccgacgcgggtctgcagggcaggccccatacgactgggcaacgacacctgcaccaccgggatatctgccgccgggtacatcagcgacagcggcacccaggtgccgtggtcgaaggggcgacggtcatcgatgcgcgcaggcaggccatcggcgtgcagcagctcgacaatcttgccggccagctgcgggtcacccggtgccgggtactgcacggcaaacagcttgcgggggaagccgccgaagtcgtgccaggtttcgggcgcggcgctgccgctgaccaggagttcagagctttcccagtgcgccgacaccaccacgattgcctggggccgtggcatctcggccgctagccgttgcagcgccgggccactggcgccgggttgcagggcgagcatgggcgatccgtgggagataaacaggctggggagcataagtagggtcctgagcgttaacatgggcccatcttcaatcagatcattgatctaaatctaatataagttttagtgccatttgatcgaatttcatggaggatctatggagcctaagttttggcaggagcgctgggcgaataatcagatcggctttcacttgcccgaggtcaacccctacctgcaacggcactggccgcggttggccgatggcgccaaagtattggtgccgctgtgtggcaagagcctggacctgatatggctggccgcccaaggtttgcatgtgctcggtgtagagctttctgagcaggcggtcgaggcgttcttcaacgaacaaaatctcgtcccgcgaatcaccgaacgtggcgcgttcaaggtgtaccaggcagatttgatcgaagtgtggtgcggcgacttttttgccctggagcctgaagtgttagctggttgcgctgcgctttatgatcgcgccgcactgatcgctttgccgccgctgatgcgtgcgcaatataccgagcatttgaatgcttgcctgcgtcctggctgtcagggcctgctgatcacccttgactatgaccagacgcaaaaagccggcccgccctttgcggtggctgacgatgaggtggcggtgctgctcgggccgcactgggcgttgaaggtgcttgaggagcaagacatcctgggggagagctggaagtttgtgcaggacggcgtcacacggctggatgaacgggtgtatcagttaaccaggcgctgaatttaccgatcgctatcgggggcaagccccctcccacttttgatgtgtgaacgcatgcaaaatgtgagagggggcttgcccccgatgaggccttcagacctgcaaaaaaggggcgatcagatcgccccttttttgtgttgctgtcgcctgtcagccccgacgacgcaacgcgtcgatccgttcttccagcggcgggtggctcatgaacaggcgagccatgccctgcttgataccgccgttgatgccgaaggcggtcaggctgtccggcatatgcaccggcaggccttgttcggagcgcaggtgttgcagcgctgcgatcattgccccggtaccggccaggcgtgccccggcttcgtctgcacggaactcccgtttgcgcgaaaaccacatggtgatcgcgctggccaggaaacccagcaccacttcggcgaagatggtcgccacgaagtaggcaatgccgcggccgccttcgttcttgaagatgaccttgtcgacaaagttgccgatgatccgcgcgaagaacatcacgaaggtgttcaccacaccctggaccagcgccaaggtgaccatgtcaccgttggccacgtggccgatctcgtgggccagcacggctttcacttcgtcgtaggagaagcgttccagcatgccctggctgaccgcaacgagtgcgtcgttcttgttccagccggtggcaaaggcgttggcttcataggccgggaagatcccgacttcaggcatcttgatgccggcctcgcgcgacaactcctcgacggtttgcagcaaccattgctcatgccgggtacgtggctgggtgatgacctgggtgctggtgctcatcttcgccatccacttggagatgaacagcgagaacagcgagccggcaaaaccaaagaccgcacagaagaccagcagctgattgaggttcaggtcaaccccgttggccgccatgaacccgttgaagccgaaaaggctcaaggtgatgctggcaatcagcacgaccgcaaggttagtggccaagaacagcaggatgcgcatcatggttgtagagttctcctcatgcttaatatgtcgcgtactgcggggtatataaggtgccgcatggggtgattcaaccgagcgactatttcaaactgtgtcctacagcctgaatgtagaggcttgaagggaatttccgatagggaaaaggtcgtttgatcggttcaccgttgccttgaagccctgtgattatggggtgtggggggctttttcggcgccagcgaggtggcaaggtagaagaggggcagagaagtgttgccagatactcgccgtacgaccgattgtcggtcgtacggcgccgtttcccttactggcgataggacttgaggaagttgccgatacgaccgatggccatgtccaggtcatccacgcgcggcaacgtcaccacgcggaagtgatccggccacggccagttgaacgcggtgccttgcaccaccagtagcttttccgacagcagcaggtcgagcacgaacttttcgtcgttgaggatcgggcataccttggggtcgatccgcgggaacgcatacagcgctcccatgggttttacgcagctgacgcccgggatcgcattgagcagttcccaagtgcggttgcgctgctccagcaggcggccttggggcaggaccaggtcattgatgctctggtagccgcccaaggcggtctggatggcgtgctggctcggcacgttggcacacaggcgcatgttggccagcatgtcgatgccttcgatgtagctctgggcgttgtgcttgggaccggagatggcgatccagccggagcggaaacccgccacgcggtaggacttggacaggccgttgaaggtcaggcacagcaggtctggcgccagggaggcagtgcatacgtgcacggcgtcatcgtagaggatcttgtcgtagatctcgtcggagaacaccaccaggttgtgctggcgtgccagctcgagcatgcccagcagcacttccttggagtaaacggcgccggtcgggttgttcgggttgatgatgaccagggccttggtgttcggggtgatcttggccttgatgtcggccaggtccgggaaccagtcggcgccttcgtcacacaggtagtgcaccgggtggccaccggccagggtcacggcggcggtccacagcgggtagtccggcgccggtaccagtacttcgtcgccattgttgagcagggcctgcatggacatcacgatcagttcggacacgccattgcccaggtagatgtcctcgatgccgacaccttcgacctgcttctgctggtagtactgcatcacggccttgcgcgcactgaacaggcctttggagtcgctgtagccttgggcagtgggcaggttgcggatcacgtcctggaggatttcgtccggcgcttcgaaaccaaagggcgccgggttgccaatgttcagcttgaggatgcgatggccttcctcttccaggcgtttggcgtgcttgagcactgggccgcgaatgtcgtagcagacgttggcgagcttgttcgatttgctgacctgcatggcgatgtgatcctgaaaatgaacgatccagacggtgtgggcactaccgtactgtgaatcctgcgaaggccgcacccataaatacgtttgaatgccggtagcgcgggtgccagactggcgttttgaagaggcgcaatcatacgtgccgcctgatccatggaaaagacacagatcaggctttttcagttgccgaggtgtaccgatggaaaagttgcagaaaacgctggaggaatggcgggaaatgctcgaccccgcgcaatatcaggtgtgtcgactgaagggcactgagcgcccgttctccggcaagtacaacgccaccaccacggatggcgtgtaccactgcatttgctgcaacgaaccgctgttcgattccagcaccaagttcgatgccggttgtggctggcccagcttctacgagccgatcgccgacagcgcgatgatcgagatccgtgacgtcagccacggcatgatccgcaccgaagtcacctgcgccaaatgcgatgcgcatctggggcacgtgttcccggacggcccgccgccgaccggcttgcgttattgcatcaactcggtgtgcctggacctcgtcccgcgttgaattgaacggcgcggcaccctgtaggagaccggattactggcgatggcgatctcacggacgctatcgccggcaagccgggctcctacaagggaggggtgatagcgagatatcaatttcgccaattaaattgagtacaatttaattgcatactatctttttccttcttccccccaatcgaggcactgccatgagcaacaacctgctgagcatcccttgcaccaccatcaagggtgagcaaaagaccttggccgatttcgccggcaaggccatcctcgtggtcaacactgcaagcaagtgcggtttcactccacagtacaaaggcctggagcagctctggcagcagtacaaggaccagggtttggtggtattggggtttccttgcaaccagtttggcaagcaagagcccggtaacgaaggcgcgatttccgaattctgcgagctgaattttggtgtcagcttcccgctgttcaaaaagatcgacgtgaatggcagcgacgcccaccctttgttcgtacagctgaaaaagcaggcaccgggcctgctgggttccaaggggatcaagtggaacttcaccaagttcctcattggccgtgacggccaggtggtcaagcgttttgccccgaccaccaagccgcaggacctgacccaagagattgaagccctgctcaaatgaccgtctccctggcgctcgaccatcaactgtgtttcaagctctacgcagcgtcgcgggcggtgacccgtgcctacaagccgatgctggatcaactcggcctgacctacccgcagtacctggtgatgctggtgctatgggagtggcatgccgcaacgccggcgcaacccacggtcaaggccttgggcgaacgcctgatgctcgactctggcacgctcacgccgctgctcaaacgccttgagcagctcggctgggtcaggcgccagcgcagcgccagggatgagcgcgaagtgcacctgggcctcagcgaaagcggtgtgcaactgcgtgaccaggcccatggcctgaagacccggctgctgtgcgacagcggtatcgacctgaaccaggccgacacgttgcgcgatggcctcgaccagttgctccggcagatcacagacttgtcgccttcggcacccacaggtccagcaatccgctgagctcctcgcggcgaaacggcttggccaggtagtcattcatgcctgcggcccggcaacgctcgcgttcttccgacagggcgttggcggtcagtgcgacgatcggcaggtccggccagcgcccgctgcgacggatctgtcggctggcctcgtaaccatccatcactggcatattgcagtccatcagcaccatgtcgaagggttgttcctcaagcagcctgagtgcttcgccaccgtgggcggccacgatcacctcacaccccagtttgccgagcatgcccttggccaccagttggttgaccgggttgtcctccaccagcaggatgcgcgcccggtgcatcaggggcgcagcgtccatctggatcgggtcgaggatcagttgcgcttcgctgcgcaggttacgttgcaggatctgatacagcgcgttgcggctcaacgggcgcgcctgttgctgcaacggtgccagtgccgcgacttcttcgctgggcatgaaattgccataggcggtcaccagcaggatgggggcgctaatggcggggcgcaggcggaacaggcattcggggcagtcggtgatcagcaggtccggggtttgcccgctcaagtcatcgtcttgcgtatagcagtgcggtgtcagcccccagtggggcagcagggtggtgagcagctcggtcaggccactgccgacactggtaatggcgatgacgtcacccttgagcggtgtcggttgcaccgcaggcaaatggatcggcaacggcaagtctgcgcagaattggctgccgaagcccacctccgagctgatgctcaagcggccctgcatggcttcacacaggttgtgcgtcaacgccaggcccaggcccgtgccgccaaactgacgggtgatgccggcaccggcctgggtaaagggttggaagattttcacctgggcttcctgcgcaatgccgatgccggtatcacacacctcgatgcgtacccggccctcctgcgcgctgaggcgaacatccacacggccgaagcgcgtgaatttcaaggcgttggacagcaggttactgacgatttgccgcacgcgggtcgggtcacccaagacctgggcgggaaactgcgggtcgatcaggcaggtcagttcgacgctcggcgccgcgttctgcgacagcaggttggcggtgtcttccaccagtgaacccaggtcgaacgggatgtgctccagctccaactggccggcgtcgaacttggacaggtcgaggatatcgttaagcaattccaccagcaccttgcccgagtcatgggcgatggacagttgctggcgttgctcggcgttgagcgggctgtccagcgacagcgcgatcatccccagcaggccattgagcggggtgcgaatctcgtggctcatgttggccaggaaggccgcccgcgcctgggccatgcccagtgcatgcatctttgcggattccagttcatcgttggactggctcagccgctggttgctggccttgagctccagggtgcgggcggagacgatgtcttccagttgccccaggtactcggtcagccgatcttcagcgtgacggcgttgctggatctccgtctccatgttctcgaactgctggttggcaacgttcaccagcacgccgatctcgtcgtgctcgtggcccggcgggcagtccaggcgggcctgccggcgattgctgagctcgcggatgatgcgcaccaaaggctgggtcaacatcacgtagaacaggcccagcaggatgccggtcagcaacaggctgcgggcgaagccgttgagtagcgtgatctcggcacggcgcagaaagcggctgccaaaggcgtaggtgtccacatccaggcgcagcaccccaagggactcgttgggcatgtgactgaggaacagccggtcctcaaactggcggttggcaccgaacaggaagtcgctgataggacggtaggtgctttctttgcgcgggctgtcgacatcggccagcaccacgccgttgttgtcgatcaactgggcgtgaacgatggcgggggagtgcaaaaggcccagggtcaattcctgggccagttcggcgtcgatgttgtaggcgatgcgtgacgcggggttgtggctgatttcgatcagcgagcgaatttcacggttgatggatgcgtcttcgctggcataatcgataccgatttggatcaggctgagcaaggttcccaagacgaaaccgaccagcacagtcaatctggcttgtttataagacaagcggtgggcgaacttgatatccatcgagtgttgaaccacttcacgtttcccttcgcccggcaagcatagctgaacatccacaagctctggcttacccggcatgaatcgttttttacgcagcctcgtgcggtctgccgcagggttgccaatacgccatcttttgcaagaacttgccagaggaataatcgtggactctcgattgaatgcctttcttgaacgggctgaaaccgtgctcgcccgcctggagccgttgttgcccgcgccgcgccaagccatcgattggaaccagtgcctggctgcgcgctggcagcgcgaaggccgcagtggtttcctgttgccgctggacgtgagcctggacatgcgcctgtccgacctgattggcgtggacaagcaacgtgaaacactggcgcgcaatacccagcaattcatcgatggcctgcccgccaaccatgcactgctgtggggttcgcgtggcaccggtaaatcgtccatggtgcgcgcgttgctggcccagcatgccaaggcgggcctgcgcctgatcgaaatcgagcgtgatcatctcgctgatctgccgcgtgtggtcgagcaactgctcaagttgccgcagcgctttatcctgttctgtgatgacctgtcgttcgaggccggcgaaggcgattaccgcgtgctgaaaagcgtgctggacggctccctcgaacaggctccggaaaacgtgctgctgtacgcgacctccaaccgccgtcacctggtcccggagaaccaaagcgacaatgacaactggaaacgcgtggatggcgagctgcaccccagcgaagcggtggaagacaagattgccttgtccgaccgttttggcctgtggctgtcgttctatccgtttacccaggagcatttcctggatgtggtggagcactggatcggtgagctggcgagcaaggccggtttgcaatggcagcgcgatgaagccctcgacatcctcgccgtgcgctgggcgaccggtcgcggcaaccgcaacggccgttgcgcgtaccaatttgcccgttactgggtaggccttaaattgttggagcttcaaccatgatcgatctaaatagcgcaggcaccggcctggatggctatgcgatgctctgcgcgcaactggagtcgctgctggccgatgagcgcgacttcatcgccaacagtgcgcagttctccgctttcctgttcaatcaactggacgacttgaactgggccggcttctatctgaaccgtaacgaagagctggtgctcggaccgttccagggccagatcgcctgtgtgcgcattccctttggtcgcggggtctgcggggcggcggccgcaacgcggcagacccagcgggtggaggatgtgcatgcgttccccgggcacattgcctgcgacagcgcatcgaacagtgagctggtggtgcctttggtcaaggacggcaagctggttggcgttcttgacctcgacagcccgtcgctcgcacgctttacgctccaggaccaggcgggcattgaacagctggcggcgattttcctgcgtctgaccgactgctgatcacgcaaggggcagcaatgccccttactgaccctccgggctgtggagttgcacttgcagcaaccgctccagttccagcatgaacttttccagggttttcgcacccgcctcgattaacgcccagtcatcaccacgggcacacgcctgttcgagggtttcgcactgcccggccaatgaggccgcctgaacaatacgggcggcacccttgatcttgtgggcctgctcaatgatctcctgaagcggggcgtgtgcggttatcagcgcggtcagtgcctggcgatcattccggctgctgctcaacagctcctccagcagtcgcccattcaactgtggatcgccgccggtcaacgcctcgaagttgccaaggtccaggtgcaagtccactgttttaggggcgatctgcgccagttgccgctccagggtcgtgaggctgatgggtttgaacaggcaatcgttcatgccggcctgagcacagcgttgtttctcttcaggctgtgcattggcggtaaacccaagcaccacgcacggtgccagttgctcgcgctgttcgtattcgcgaatcgaacgactcaactcgtagccattcatgatgggcatgttgcagtcggcgatgaccaagtcgaagcgttcctggcgccatgcctggaaaccggctgcgccattctgggctgcggtgaactggtggcccaggtagcccagttgctggcacatcagcaagcggttggcgggatggtcgtccaccaccaacacattgagtaccggcgtggttgcgggcttctcgggtttctgttcatcggctgcctgttccggctgcagtcgcggcattcgcaggttgacatgcacctgggtgcccaccatgggcacactgctcaggctcagctctccacccatcattgcgcacaggctgcggcagatcaccagccccaggcccgcgccgctcctggcgagctgcccggaattgtcggcctgggcaaagggttcgaacaggcgtttctggtcatcgcggctgatacctatcccggtatcctccaccaccagcttcatctcgacctgttgcgccagttcggtgggcaatacgtcgacgcggatttttacctggccacgttcggtgaacttgatggcattgctgatcaggttcgacagcacctgcttgaagcgcagcgggtcgatcaggacttcggtgtcgtcctggtcgggtttgaactcaagggacaggctgagggttttctggcgcgccaggccgtcgaagacacgcaccaccgactcgatcacctcgcgcaggttgacccgttccggcgccaggctcaggcggccggactcgatacgtgcgatgtccaggatatcgccgatcagctccagcaggtccttggccgagttgtacgcgacttcgatggccgggcgatccaggtggccatggtcggcgcgtttgagggtcagctccagcatgccgatcaccgcgttcatcggcgtacgtatttcatggctcatggtcgcgaggaacgtgctcttggcccgattggcttcgtcggcgcgctctttggccgcgcggatctcatcgaacaattggcggcgctcgctgatgtcaatccagccaccgatgatcccttgcacctccccggtagaatcgcggtagggcaggatccagtgatagatcgtcagtttttccccgcggatatgcagggtgcggtccaggatcagcgggttaccttcggccattacccgctggtagtcggcatggtactgctccgcgtccgtctccagggtttcgctcatctgcagggcacttttgccgatcacatcctcgcgcttgacctcaaacacttgcaggtagctgtcgttgcaggtctgcagcaggcctttacgatcacgcacatagatggggtgcggggtttcattgaccagcgcgcgcatgaattcgaactgatcgttgagggcccgctcggccatcttgcggtgcttgatctgacggcgcatgtaggcgttccaggccagggagatcagcagtagcagcccggtgccgatgatgatacgggctatcagttggtggtagtcgcgccagtagctgtcggaggcggcggtgtagccccgccagcggctgttgatcacccccagttcatccggggcgatgctcaacagggccttgtcgaggatcgagctgagttcggtggcactgcgcgatgtggccagggcaaacatggccgggaaggtgccgatgctcgtactcatctgcagcttgtcctggaacacctgggacgacaggaagtagttggcgaccaccagggagttcaccgcgccttccacgtgtccctgggccaacagttccgaagccttgaaggtgtcgctggcttttaccagttggacctggggaaagtcgcgacgaaggatagcctccagagggttgcccggcgtgattgccaggcgtttgccggccatctgctccaggttagagggggcattgggttctttgcgtgtcagcaggacataggagttttccaggtagggccggctgaagttcagttgcgcctcccgctcggcgctgggcacgatggccccgataatgtcggccttgccggtgtccacctgctcgatcattgcattgacgtcgcgttcgcgctggatctcgaagcgcagcccggtgcgcaggcggaccaactccagcaggtcggcggtgatgccgcgaaagttgccgtcggcatcaaaaaaggtcaggggtgcgaaggtttcattcacaaccaccttgactaccggatggtctttcaaccagcgctcttcgcgttgggtcagttgcagtttctggtcggacagcaagatgtcgctgccggcgctccagcgcttggcgatcatttcccgttcgttcatgggcacggtggtcagaaccgcgtcaacaatactcaagagggtgcgctggtgttggggcatggcaaagctgaacccgtaggcttcgtgtttaccgaagttggccatgcggatgttcttcaggtagcccttgttgatcatgtaatgggtggaaatggtatcgccgaggaacacgtcagcctggtcgaacgccaccgcattcagggcattttgataagaggggtaggcacggatgattgcctgggggtacagcttttccacttcgtccaggggcaggtagtggtagaccagggccaggcgcatgccggccaggccatcgttcaggctgcgggtttcaccttcgcgggtgaccagcaccggttggtcgacggcatagggttcggacagcgtgaggttcgggttcgccgcctcgaagccgttggaggagcccagtagatcgatatccccggcttcaagcgcgcggatcgccgcttcacgggaaggatagcgcagtactttcactggcaaggccagcgccttggccaacaggccggcgtaatcagcggtaagtccttcgtagtcgcgaccgctggacgtgaggtcgaacggaggatagtcaggggccgcagtgcccaataccagttcgcgcttgttttgcagccattggcgctgggccttgttaaggtttgtttccagttgaacggagcctgcacggctcaacaaggtgaaatgttccgggcccgtttgatggttcgcgagcacggcggtgctgaagcacaaaccggcactcaatataatcagatagtcctttatacgcctgggcatccgctttctcacactagcgcgtttcgttttgccatctcgataagttctaccaaggatttggcttgaagtttttgcatcagcctctttttgtaagtgcttactgttttgttgctcaggaacataccttttgcaatttccttattggtgcggccttgtgcaaaaagttgcaaaaccataagttcgcggtcgttgacgttcttgaacagttcaagttcctgggagtcgcagccgtctgcaccactgctgttcagtgcctggctgggaaagtagttgtagccggacaacaccgcgcggatggcgctcagcaattcgctcaggtcgccttccttgcacacgtagccatcggcgcccgagcgcatgcagcgtgtggcgaacaaggtgggggactgagccgtcaggatcagggttttcatttgcgtgttcatggcgttgaaccggcagagcacttcgagcccgtcgagcttggggatgctgatatcgaggatgatgaggtcaggcaagcattcgcggaccatttgtatggcatcgcatccgttgtccgtttctcccaccactttgtaaccttcgtgttccaacaacattcggatggcaagccgtataaccgggtggtcatcgataataaaaactgagttcatgatcacattccgtgcaagtgcaaataaagcgggcacattagctcagaaggggaggcgggagcatgagctcaggggggagtagatataaaacaggaaagttcctacattaaaaaaggtaaaggcctacccgttgctcaggctgtgcgaagtgatatgccagcgcttgtgagatgaatgaattaaatcttgccgctatggaattagctggctcggtactgagctttttcttcggggcctgatgtttaaaatcctacatgtgtgacctgagtaatgggcagatcaaacgtgccagctcatctttgttgagcggttttgacaaatagccgagcaatggcaggccacggtccaccgcttggtctatcagggcggcgagttctgtcgcgggcagtccactcaggaggatggcagttgtggtaaagcgtcggcgactggcgatttcaatcagctcgagtccaggcaggtcgggcaggcattgatcgcacaggatgatgtcgaagggcatctcggcccgcgacattaaacagatagcctgttcggcgttctcggcgggggtcacccgtgcgaagccgaagcttctgagcaggcactgggtggcgaggagttgaaagggatgatcctccaccagcaggatacgaagcggataactgggcattggggggcacacggtgagtcaagcgtcgatggagggcgcgtaggaacagttcgcctgggtcgcccggagcgtgcgtgagtattcattgggtgcttgtgcgaattcgatcaggccgctctgttcccttcgtaggtcgattcctttcgggcaacaggcggcttgatcgtgctcgtcattgggggctggagcgcccggtcatttcccgggccatttcggtggcatagctgtcggtcatgccggcgatgaagtcgatcatgcgcaggaacgaggcgtgcaaaggccaatgggggttcggcgcgttgttacccagcaggtcgagaatgcgccgattcttgaacgacggcgtacgcccgccatgctgctccagggctgcaccgcaaaaggcgttcagcagaatttccaaggtggtgtaggcgccgatttcatgcaatgtcttgcgcttgtcctggaagatcttcttgcgtgccatgtccttggcgtccagcacgcaacgcttggccgggccgtgcatgtgctccaccaggtcgccgggcagggtgccggcgagcaaggcatcctgttgttcgacaaaggcccgcgcggccgcgttggtcaggtgttcgatagccttgccgcgcaggatcgccaacttgcgccgccgcgagtcctgcgcaccgagttgacgataggtctgcggcaggtcatcgcctaccaggtcgagcagcaacgactcgacctcggtgtattccagcaactccatttccaggccgtcttccaggtcgatcaaggcataacagatgtcatcggctgcctccatcaagtacaccagcggatgccgggcccagcgctgttcttcgagttgcggcaggccgagcttgtgggcgatctgctcgaggatcggcaattcactctggtaacagccgaacttgtgtttcttgtagcccagggagtcggcgtggcgggcggtccaagggtatttcaggtaagtgcctagggtggcgtaggtcaaccgcgtgccgccgtcgaactggtgatattcaagctgggtgagcacgcggaagccttgggcgttgccttcgaagttgaggaagtcattacgctcggcgctgctcatgtcatccagccaaccgcggcctgcggcctgctggaaccaatggcggatggcgtcttcgccggagtgcccgaacggcgggttgccgatgtcatgggccaggcaggccgattgcaccaccatgcccaggtcgctcgggtcgcaccagtcgggcagggcgctgcgcagggtttcgccgacgcgcatgccgagggagcggcccacgcagctgacttccagggagtgggtcaggcgcgtgtggatgtggtcgttgctggagaccgggtgcacttgggtcttgcggcccaggcggcgaaatgcgccggagaagataatacggtcatggtctttgtggaacgggctacggcccagttcttccgggctgtgcagcggtttacctagacgttcgcgagtcagcagggtgggccaatccaaggcgggtactctccgtgcggtgaatgaccctcccagcttcccggttcagcgcgggctgggcaagcgaaaatctacagcccggccgcgtcgatatcgattaacagcaaacgctgaccgttatcaaagaattgtccggcggtgaggcaatactggttggtggtcgcgtcgcggtaggtcgaggagagggtcagacggcgctcgtcccacccttcggccaacaggtgatagaagtacgggcgccacgaccagttgtggcccagataaaggctgtcggcctgccaggcgtcctggcgccactcgaagttgggcgtcagctgagtgccgtgtcggtcgcattggtagaagcgcagcagccaggggaaagccggcagttggggcaactggctcagcggcgcttgtgcctgagcccaggtttgcaggattttcatcagctcggccaattgctggcgcaattgcatgatgcgcccgcgttccgccagtttttgctggacgtaggccgtgcgcaactgggcaaaacgtggcacgaaggcgtcggcggcaaaccagtccaactgtgcctgggcaaacagatagccctgcacataccgcgagccgcactccagggcgaagctcaactgtgcttcggtttccacgccttcggcaatgatccagcagccggttttctcggccatctgtgccagcgcccgcaccacttcgctgctgggcccaccgcgggcggcttcctggaacaggcgcatgtccagcttgagaatgtccggttgcaatgccagcacccggtcgagttgggaatagccggcgccgaagtcatcgatggcgatacgcgcaccggcctcgcggtaacgcgcgaccacgtcggccaggcgttggatgtcgccacccagttcggtgatctcgaacacgatccgctgcgggtcgacaccatggctatgaatctgtttcaggctcggcagggcttggcccggacgcaggcggttgatccagcgcggtgagatgttcaggctcaggaaccagtcggcgggcgcttcatgcaggcggctcagggcattgtcgcgaatctgccggtcgagacggcgcaaggtcacgcccggggtgcgcgggtcggcgaacagcggccccaccgattgcaggcgcccgtcggcctggcgcagtcggccgagggcctcgacgccggcgatgcggccggtggcggtatcgataaacggctggaagcaggcgagcggttgcccgtcgatcacggggcctccttaagcgaggtggctgaaaaaaaggcccggccctcgaaaacgagggtcgggccgattctgttagcaagaatgcagccagccaggctcaacttttgcgcgaagtgccctgcatggccaatttgatcagcgggatcaagccggcaccgagacgcaccaggcgtgtcaggctgctgataccgccgcccttggcgcctttgccggtaaaaaagcccatcagcgtcaccgcagccacgccccacagcggcgcgtgcttgatgcccaggctgtcttgccagtgactgcccaggttgcgcaccttgttcaacggcagcatcaattgctgggactcgtggcggatttcctgacggtgcatttccatgcgcaggcggatcaacgccttgcgcatttcccgccgtgacgtgttttttggcatttcagtcaggctcatggcagcaagcgctcccgatcattggccagttcttcgagggtggcatggaacggcgtggattcatcgaacaccgccgctttcaagcgcaccccgcaaaaggctgcggccaggctgtagaacacgcagaggcagatgatgccggtcaggcggtagccggtgtcccacaccaggatcatcaccagcgtcgacagccccaccagcaacagcaatgcaaacaccaatgccaggccggcaaacagcagcaggctgacggtgcgggccttctgttcctgcaattcgatgccaaacaattcgacgtggctgtgcagcaagcccagcacggccgcgcccagacgccttgaggtagtgcccgtggacgagccagtttcgccgatagacatgatttagcgccttgtggccagcaggccgatcagaaagcccacgccggcggcaatgcccaccgactgccaagggttggcctgcacgtaatcttcagtcgcggtgacggccgcctggccgcgttcgcgcagcgagtcttcggtcagttgcagggtttctcgggccttgagcaggctttcgtgaatcttgctgcgcagctcatcggcctggtcacctgccagcaccttggtgtcatccagcaacttttcggtgtcgctgaccagggtttgaaaatccgccatcagtatttcttgcgcagtctttgcagttcttctggccatggttatctccgtgatgggctgttttgtacgtagtggtttcgagtcaccggcgtcggtgaaggttcagtgcaattgtgtggtacagcttttgctttgccttggtgcgcaggccttgctgcctgcgctgaatccgggcggtcgggcaggaagccttgaaaaaccttaccctaaataactgaaactcgcggaaaaaccctgtcggcaacgacctgatgcgttgatcgctgcgctaaatcggttcacgccctctgaagaggggtggggccggcggtgccaatttagtgcgcgcaacccaggtttgaaccgctttggtgctttttgcctttactgcaggcctgccaacctccatggaaaatgtgcaaagtgcggtggacaccctgatccacagctccaataccctgtttatcctgatcggcgcggtcatggtcctggccatgcacgccggcttcgcgttcctcgaagtcggcacggtgcgccagaagaaccaggtcaacgccttgtcgaagatcctcagcgacttcgccatctccacactggcctatttctttataggctattggatctcctacggggtgagcttcatgcaaccggcggcggtgatcagcgccgaccatggctacggcctggtgaagttcttcttcctgctgacctttgcggcggcgatcccggcgatcatttccggggggattgccgagcgggcacggtttgcgccgcagctctgcgcgaccgcgttgatcgtggcgtttatctacccgtttttcgagggcatggtgtggaacggcaatttcggcctgcaggcctggttgctcgcgacgttcggcgccagcttccatgatttcgccggctccgtggtggtccacgccatgggcggctggctggcgctggcggcggtgttgctgcttggcccgcgcaacgggcgctaccgcgaagggcgcctggtggcgttcgcgccgtcgagcattccgttcctggcattggggtcgtggatcctgattgtcggttggtttggcttcaacgtgatgagtgcgcaaacgttgaatggcgtcagtggcctggtggcggtcaactcgctgatggccatggttggcggcaccgtcgcagccttgatcattggccgcaacgatccgggtttcctgcataacggcccgctggccgggctggtggccatttgtgcgggttccgacttgatgcacccggtgggcgcactggtcacaggggccgtcgccggtggtttgtttgtgtggttctttatcgccgcccaggatcgctggaagatcgacgacgtgttgggcgtgtggccgttgcatggcctgtgcggcgtgtggggcggcattgcctgcggcatcttcggccagacggcgctgggtggactgggcggtgtcagcctggtcagccagttgatcggcaccgcccttggcgtgttggtcgcgttggccggcggcctgctggtgtacggcgtgatcaagcgcgtgcatgggctgcgcctgagccaggaagaggagtattacggcgcggatctgtcgatccataagatcggcgcggtcagtcaggattgatcggctcgtctgcctggcgataaaaaccgtgcagcaggcggtagcggttctgtcgtacttcatcgacccgcgcctgcacctgttggtccggcaggcccaatagaatcagggcgtgggaggcaagcatcaggcttgactccaatagttcgggcaccacttcgctggcgcctgcggccttcagctcagccagttggctgtcgtcgcgggtgcgtaccaggatcggcacttcggtgttgatccggcgtgcttccttcaacaccaccagcgcgacatcggtgttgtctacggcaatcaccaccaaccgtgcgcgctccaggccgaccgcactgagcaatgcgccacgccggcaatcaccgtagtgcacgctgctgtcttcggtggcggcttcctgtacccgttccgggtcgtcatccagagcgatgaatgcctgttgttccttgcgcagaaagcgtccgatggattggccgacgcgaccatagccgcagatcaccgcgtggccgtgcagctcggcgttgagcgcggtgatggcttccagttgcacttgctggttgggcttgcggtgcaggcgcagagcaatgcccggcgcggcacgcagcagcaggggtgtcagcagcatcgagcagaaggtggcggcgagcagcaagccgttgaattcatccgggatcagtcggctctgctgcatctgtgccatcaacgcaaagcagaactcgccgccctgggccagtgccaggccgctgcgccaggcggtttcgctgtcgctgccgcgcagcttgaccagcgcggcgaccacacagcccttgaccagcatcagggtgagggtcagggcgaggatcaacaggctgtggctgacgaacagttgcaggtcgatgagcatgccgatactgacgaaaaacagccccagcaggatgtcgcgaaacggacggatatctgcctcgatctgatggcggtagtggctttctcccaacagcatgccggccaggaacgcgccgagggcaggggagagccccagcaggtgcgtgagccaggcggtcagcaacacaatcaccagcgccagcagtacaaacagctcggccgagtgcgaggcggccacctcatgaaacaagcgcggcagcagccagcgactggcaagcagcaggccgacaaacaacaccacggtcttgcccagggtcagtggcagcgcccagtaccaggcttgttcgccggtgccggcaaacaccggcaccagggtcagcaacagcaccgccaccacgtcctggaacagcaacacgccaatcgcgttctggccatggctgctgaagatttcaccgaggctggtcaactccttgctgacgatggccgtggatgacagcgccagccctgcgcccagtaacaacgcgatacccggcgccacccccaggatcatcaacaagatgcccagcagtgccccgcagcccaacacctgcagactgcccaggccgaacaccacgcggcgcagggcgagcatcttggtcagggaaaattccaggcccagggagaacagcaggaacaccacgcccagttcggcgaggtcgggcagctcctcgctgtcattcacccagtccagcgcggtaggccccacggccaggccgacgcacaggtagcccagcacgggcggcagttgcagccggcgaaacagcgcaatcaccaccagggatgaggccagaatgatcagcaggttggcaaacacacgcatctccattgcaagggggcaggcaaaaagccgcgagaatcgctgaaacagttataggccatggtgacctgggtcagggttttcaggggctggtttctcgccacaggttttcgtcaggcttagaatgttggcctactttctgatcaggtccattcgtcatgcttcctgaatgccagttgttcggcaccctgggttgccatctatgtgaaattgctgaagccgaaatcatgccgctcgtcgaacacgggttgctggtggagctggtggatatcgccgaccccgacgacctgaccgaagcctacggcctgcggattccggtactccgccgggtggacacgggggcggaactggattggccatttgactcacaacaggtcgtggccttccttcgttgagtttatgcgatggcaggtttccaaatattacgttactgtatgtttgtacagcgattgaatagagggagcgcccgtggtgaatgttgaacaactgaaaagcagcgtcaatcgcatgtctgccgacgtcgtgcgcgacgcggtgaacgagctgcgcctcgatggcctggtcacggaaggcaagacgccttttaacaaggtgcatttcaatacctgctttgccgagatcgaggcgctgttccagcgcgccggttaccacaagcagctggatgtggtgggttaccagggcttgttgtacgcgttgtacgatccaggccgctgggaagccgtggacgtgttgcgctggctcaaggaattcaccgaggccgcgagtgcctcgccgatcctgcgggcggagttggccaaggcctgaatccgccctaggctcaatcccgcccgatgcgggataatgcccgccggttttcccaggctttgagcatttcatgtcgacttccgtttttatcgcctccgagcgccaagccagcaccctgtatttgccgcccggtccttgggcgacggtgctcgattgcctgtgcgagcacttcccggcgatcggccgcgaacagtggctcgaccgcatcgcccgtggccgggtgctggacatcgacggcagccccatcagcctggacctggcctacaaggaaggcctgtgcatctattacttccgcgaagtgccgaacgagaaagtcatcccggtgcaggaaaccatcctgtacgccgatgagcacctggtggtcgctgacaaaccgcacttcctgcccgtgacccccgccggtgaatacgtcgagcaaaccctgctgcgccgcttgattcgccgcctggacaacccgtcgctggtgcccttgcatcgcatcgaccggcacacggcggggctggtgttgttctcggcccacccggccagccgctcggcatatcagcaattgtttcccacccgccagatcgacaagttctacgaagccatcgctccggccctgccgaacttgacgttccccctggtgcataaaagccgcctggtcgatggcgagccgttctttcgcatgcaggaagggcctggcgcgagtaacaccgaaacggcggtggaagtgcgcgaaaagaacggcgatctatggcgctatggcctgtttcccgtcaccggcaagaagcaccagttgcgtgtgcacatgagtgccctcggcgcgagtatttgtaacgacccgttctaccctgacgtgatcaaggacgcggtagacgactacgccaacccgctgaaactgctggcccagggggtgcggtttatcgacccggttacgggcgaagaacgcagtttccgcagccggatcaccctcgactggtaaccgccagaaacgacaaggcccgcgcgaggcgggccttggattaaccggatagctggggctttctgatactgcgtggtgtcccgttcagggcggcttcgccacccagcgcggggcaagcccgctcactacaggtctttgacggtgcgaacctgatccttattgatgcgggtgcgcttgccgtcaagttgttcgaattcgtagaaacccgaatcttcattgtatttcggggtgtcgacggcctggatttcgcgaccgtcattcagggtgatcactgtcggcgaggcgcaaccggcgagggtggcgaggcccagtgcaagcatgagagcggcgatggtccgttgagtcatgagtttgtctccgagagaattcttttaaatagctgaccttgtgacgcgcagggcatcgacaaagttcctgatgcgaggttcattctgacacgcccgagcgcgtctgtaacagctccggcgtattaaggttggccaggcgcgggtcatccgccgggcactcaaggcccatgccgcccagttgcaggaagagcttgcgcgggctgcgctcaccggcgtgccaggcgcgctccaccgcgtcccgcagggcggaggggaggatgcagatcagcggctcccagaactcaccatggcgcaccattaccggcagcagcgggttgcgccgtgcagtctcacacaggtcagcgagcaaccctgcgtcgatatgcggcacatcgcacggcagtatcagcaggtgcgcgtggcgcgcggcggcgagtcccgcacggatgccggcgagggggccgggaaagtccgggctgtcgtcgttgaccaattggtcggcatacgcggcgtagtgttgcgggttgcggttgcaggagatgatcaagtcatccgtcagcggccgcaccaggcgctgcaaatgggcgatcaggggctggccgtgccattccagcaggcctttgtcctggccgcccatgcgctggccacgcccaccggacagcagcaagaccgaacagggcaggggcgatgaatcgataggcatgacggttccgcagcggcagcaaaaggggggcctgtgatataacatcgggctgttccttcgacaaccggaccgtgccatgaaagccaaggcagatgcgcccttcgtacccctgaacatcgctgtattgactgtcagcgacacccgcaccctcgacactgatacctccggccaggtcttcgtcgaccgcctcaccgctgctggccacaacctggccgagcgcgtgctgctcaaggacgacctctacaagatccgcgcccaggtcgcccactggatcgccgaagacgtggtgcaagtggtgctgatcaccggcggcaccggctttaccggccgtgacagcacccccgaagccgtgagctgcctgctggacaagcaggtcgatggttttggcgaactgttccgccagatctccgtggcggacatcggcacctctaccgtgcagtcccgcgccctggccggcctggccaatggcaccctggtgtgctgcctgccgggttccaccaatgcggtgcgtaccggttgggacggcatcctcgccgagcaactggacaaccgtcaccgcccgtgcaacttcgtcccgcacctgaaacaggccgagccttgtgaatcccgtgggtaagcccggcaagaccggcgccctgatgccggtggaagacgcgttggcgcaactgctgaccatggccgaagccgcaccgatccgtgagcagcaaaccttgcccctggcggactgcgacgggcgggtattggcccaggacctggtctccaccctcgacctgccgccctggccgaacagcgccatggacggctacgccgtgcgtctgtcggactggatcggcgaacctatggtggtcagccagcgcatcttcgcaggccaggcgccacagccgttggctgccggcacctgcgcgcgcattttcaccggagcaccggtgcctgaaggcgccgactgcgtggaaatgcaggaaaacgccgtggtccacgccgatgagcgcctgagcttcaccgagccgctgcacctcgaccagaacatccgcccacagggccaggaaaccacggctggcgagttggttttgtcggccggcacgcgcctgggcccgatcgaactcgggcttgccgcctccctggggcgcgactgcctggaggtggtgcgccgcccacgtgtggcggtgctgtccaccggtgatgaactgatcgagccgggtttgccactggggccgggccagatctacaacagcaatcggcgcgtgctgtgctcgtggcttgcgcgcctgggttgtgaagtgatcgatgccggcatcctgcccgacgacctggagcaaacccgcacacgcctgggcgacctgggcagcgtcgacctgatcctgtcgaccggcggtgtgtcggtgggcgaggcggatttccttggcatcgccctgcgtgaagagggcgagttggccctgtggaaactggcgatcaaaccgggcaagccgctgaccttcgggcacttccgtggcgtgccggtgatcggcttgccaggcaacccggcgtcgacgctggtgacgttcgcactattggcgcgcccttatctgctgcgccgccaaggtgtgcaagaggtggagccactgcgtttcgaggtgccggtgggattcacctggccaaaaccgggtaaccgccgtgaatacctgcgtgggcgcatcgagcagggcaaggcgatcatctaccgcaaccagagctccggcgtgctgcgcagtgcggcgtgggcggaggggtttgtggaggtgttggaaggcacgacgctggcgatcggcgatcgggtcaacttcatcccgctcagtgaagtcctgaactgacccaatccaaatgtgggagggggcttgcccccgatggcggtgtatcagtcaacttaagtgtgactgacactctgaagtgcgccccaaaagttggacacccatccaactcctggggctttttcatgagcaagtacacgacgcaattcaagctttccgccattactgcctttcttgagcgaggtcgcggctttcgtcgcatcgccgctcaatttcaaatggaccccaccctgcttcgccgttgggtggaggcttaccggttgcacggcgagaccagtctgagcagtactggtggacgctacagtgctttgtttaagttctccgtcctacagcgcatgtggcgtgactccctttccctgcgccgcgcagcagcgcttttcaatctgggtgactctacccaagtgggaagatggcagcagcagtattacagtggcggcattgaagccctggccccagggaaaaaaggacggaccaccgcgatgcccaagccacctgcgaaacctcgtaaacctgccggcacactcaccaaagaggaacttgcacataaagccctgcttgatgagcttcaatacttgcgcatggagaacgcctacctaaaaaagcttggggagttaggcgaggcagtgatgaggcgagagaaagaagcgaagaaaaagctcgaatagtcaccgaactgaggcaagactttcccttgagtgacttgctcaaactgctgggccttgcgcgaagtacgtactactaccaactcaaaatcatggacactgcagaccgattttcctcggtaaaagcctctatccagagccttcaggaagagcatgaagggcgcttgggttaccgtcgtatgactttagaactacgtaaagaaaggccgccgatcaacggcaaaacggtacggcgactgatgggagtgctgggtctgaaatgcacagtacgaccgaagaaatacagagcgtataaagggccgatgggagaggtctcgccaaataaattggctcgccagttcgaggctgaacacccgaatcaaaaatgggtgacggatatcaccgagttcaaagtagctggaaaaaagctgtatctgtctccaattttagacttgtacaacggagagatcgtggcttatcagacagccatgcgccctcaatacgctttggttggcgacatgctggaccaagcgtttaagcgcttgcccgagggagcaaagccaatgctgcactcggatcaaggctggcattatcgatactcaaagtaccgggaacgactggaaagagagggcgtggaacagagcatgtcacgccgaggaaactgctatgacaatgccacaatggagagtttctttggcacgttgaagtcagagttttattatcgggaacgcttcgatagcgtggcccagttgcaagccggactcgataaatacatccattactacaatcataaacgaatcaaaaccaagcttggcggactgagccctgtagagtacagagcccggtccgctaaggcctagacaataactgtccagcttttggggcgcacttcactctgctatcgggggcaagccccctcccacatatgattcttcatatgcctcagtaatcgtcgccgcgctcggtgatgtcgcgctccaccggccccgcattcgggtcataccccaccgggaacttgcccttcagcgtccacgcaaacgcaatgatctcggcaatcgtgcggtacagctcctcgggaatactgtcgcccagttccatccgcgccagcagcttgaccagctcggcgttttcgtagatcggtacttcgtgttcccgcgccagcttgaggatcgcttcggccagggcgtcgtcgcccttggccgtcagggtgggggcctgctggccgtcgtacttgagggcaatcgcctggcgcggcggtatcgggttcttcatgcggtttcatccacccagcgttgttccagcccggtttttggcccgcgcggcggggtgccgaggtggcaatcgaggtcgccgacgttgatgcccgaggtcaccaggcgttcgcgcaggttgcccaagtggctttcgatcaggctggcggtgaagggccgcgaggcccacagctggctggacagtttgccctggctcagttgcgcctggacctgcaatggccccagcggctccatgtcgaaggccagctcgacgcgccagagcatctgcttggcgtccttcttgtccttgcgttcgggctggtccttgtccggcgccggttcctcgcgctggaacttgacctgcaacggcactatgtcttgcaaggtgcgcatggggatttccagctgccaggtggtttgcaagcggccgtcggcggtggtgccggtctgttccaggctcgacagctgatggctttgcagccgtgaaattgcgccggcggccaggcgcagcaggttttccaggtcgccttcaccttccagtttcgccatcagccgttcgggcagcgggaagccggcgggtagttgccgggcgctgacctggccaagtgtgttcagtgggctgcgcacgaagttgggcagcacctgggccagggtgttggcggcgaggatcgcggtcatgctggtgctggcgggcagggcgggcagcaagtccgcgaccaggcgcagcaacgcgcctttcatgtccagcggcgggatttgcgggttctgcccggcgagcagcttggcttcaagaaaggcgccgctgttctggatgacttgcgccagtaccttggggttgctgacttgcgccaggtccggcaaagcagccaacaggcgctcggcggcggagcgcagatcggcggaggtgctgtcgccgcgaggcaggttctgcagggcggtgaagacagcatccaacgagccctggcgactttgctgggtcgacagttgctggctgaccgccagttgatccttgagcccgctcaacggcacaaagctcagggtctgcgcgttttgcaccacggcgctgagcaggctgccgacgcgcaggggctgagggctttccacggtcagggtcgcgcccgccagggcgttgttgagcacagtgaccagcgagcggtagatcgccggctgcgcggtgccctggggcagcatctgggtagtcagcaccttggcctgcaacagcgtgcccaccggtatctggttggtgtcaatgcgggtgagggcggcgacattggcgctcaaggcctgctgcaggctgagggtcaggttacccgcaggcgtctggctcaccgccacattgctgcccagcggcagcggctgcgggctgctggcctgcaccagggtctggcggccgccttccagggtcaacttgagcagcaactggaaggcctcgccgccttgtttcagggcgatgacttcggcgtttgcggttttcccggggtcgatcaggccgatctgcggctccagcagtttcagcaactcaccggctgcgggcgcagggccaggcccggctgcaggggcgggtgcaagcgtaggaaggttgatctcaccggtcatcgcgcgcgtcgtctctggggaaattgccctctttagagtagggcatcacatgtataatgccgcccgtctgcaaagagagcggtaaaaacctcacaactatttgatccagctctctaaaatcggtcgccaaagccgttattgtgcatttctctttaacggccgctgcaccgccgacttgaaccgtaaaggcccgcgatcttttgaccagccctcttcttgaagccgtagcgcttgcctgtgaacgcgacctgcgcctgctgttcgagcacctcgaactgcggctgacgggcggcgacatggtgcagatcagcggccccaacggcagcggcaagaccagtttgctgcgcctgttggccgggctgatgcagccgaccgccggtgaagttcgacttaacggcaagcccctcaacgaacaacgcagcgaacttgcccgcaacctggtgtggatcggccacgccgccggtatcaaagacgtgctcaccgctgaagaaaacctcagctggctcagcgccctgcatcatcccgcttcccgcgaggccatctggcaggccctggccgctgtcggcctcaagggtttcgaagacgttccctgccacaccttgtccgctggccaacagcgccgcgtggccctggcgcgtttgtatctgccggggccgccgctgtggatcctcgacgaacccttcaccgcccttgataaacaaggcgtcgcccagttggaagagcacctggcccaacattgcgagcagggcggtctggtggttctcaccactcatcacaccctcaatcgcgtgcccgccggttatcgtgacttggacctgggccggtggtcggcatgagcgtcttcgccctgttggtcgcccgcgaagcgcggctgctctgccgtcgtccggccgaactggccaacccgctggtgttctttgcgattgtcattgcgctgttcccgttggcggttggccccgagactaaactgttgcaaaccttgtccccgggactggtgtgggtggccgcgcttttatcggtcctgctctcgctggacgggctgtttcgcagtgatttcgaagacggctccctcgaacagtgggtcctttcgccgcaccccctgccacttctggtactggccaaggtactggcacactgggctttttccggcctcgcgctagtcttgctctcgccgctgctggcaatgatgctcgggttgcccaccgaatgcctgccgatcctgctgctgagcctgttgctcggtacgccggtgctcagcctgttgggcgcagtaggcgcggcgttgaccgtgggtttgaagcggggcggcctgttgctggccctgttgattctgcctttgtacatcccggtattgatcctgggcagcggtgccttgcaagccgcgctcatgggcatgccggcgaccggttacctgttgtggctgggtagcctgaccgccctggcggtcaccctgacaccctttgctatagcggccggcctgaagatcagcgtcggcgaataatgaggtctgactaagtgttatgtcttagtcagtaaagaccctaagcttttcgcaacgacgaaaagcaaccgtgatggaaacagcaatgaactggacctggtttcacaagctcggctcgcccaaatggttctatggcatcagcggcaagctgttgccgtggttgagcgtcgccgccgtgttgctgatcggcatcggcctggtctggggcctggccttcgcgccgccggactaccagcaaggcaacagctttcgcatcatttatatccacgtacccgccgccatgctggcccagtcctgctacgtgatgctggcggtgtgcggcgttgtcggcctggtgtggaagatgaagctcgccgacgtggccctgcaatgcgccgcgcccatcggcgcctggatgaccgccgtggcgctggtcaccggcgcgatctggggcaagcccacctggggctcgtggtgggtgtgggatgcgcgactaacgtccatgttgatcctgctgttcctgtacttcggtctgattgccctgggcaacgcgatcagcaatcgtgacagcgccgccaaggcctgcgcggtgctggcgattgtcggcgtgatcaacatcccgatcatcaaatactcggtggagtggtggaacaccctgcaccagggcgccaccttcaccctcaccgaaaagccggcgatgcccgtggagatgtgggcgccgctgctgctgatggtgctggggttctactgtttcttcggcgccgtgctgctgctgcgcatgcgcctcgaagtgctcaagcgtgaagcccgcaccagttgggtcaaggccgaagtgcaaagcagcctgggagcgcgtggatgagttttgcttctttcagcgagtttctcgccatgggccatcacggcctgtacgtctggaccgcctatggcatctgcctggcggtgctggccctcaacgtcgccgcgccgatcctggcccgcaagcgttacctgcaacaagaggcgcgtcgtctgcgccgggagaccgaaaagtgaatccgctgcgtagaaagcgtctgttgatcatccttgccatcctggtgggcgtcggtattgccgtgggcctggccttgagcgccttgcaacagaacatcaacctgttctacaccccgacccagatcgccaacggcgaagcgccggtggacacgcggattcgcgccggcgggatggtggagaagggctcgctgaagcgctctgctgactccctcgacgtgaccttcgtggtcaccgacttcaacaaagccgtgaccatcacctaccgcggcatcctcccggacctgttccgcgaaggccagggcatcgtcgccctgggcaaactcaacgccgacggcgtggtagtggccgatgaagtgctggccaagcacgatgaaaaatacatgccgccggaggtcaccaaggccctgaaagacagcggccaatccgcgccaacgcctgccaaggagggctaagccatgacgtccgcactgtttattccggagctgggccagctggcgatgatcctcgccctgtgctttgccatcgtgcaggccgtggtgccgttgctcggtgcctggcgtggtgaccgtttgtggatgagcctggcgcagccggcggcctggggccagtttgctttcctgctgttcgccttcggctgcctgacctacgcgttcatgaccgacgacttttccgtcgcttatgtggccaataactccaatggcgccttgccctggtacttcaagttcagcgccgtgtggggtgcccacgagggttcgctgctgttgtgggcgttgattctcggcggctggacctttgccgtgtcggtgttctcgcgccaattgccgcaagtgatgctggcgcgggtgctggcggtgatgggcatgatcagcatcggcttcctgctgttcctgatcatgacctccaacccgttcagccgcatcctgccgcagattccggcggacgggcatgacctcaacccgttgctgcaagacatcggcctgatcgtgcacccgccgatgctctacatgggctacgtgggtttctcggtggccttcgcctttgccatcgccgccttgcttggcgggcgtcttgatgcggcctgggcgcgttggtcgcggccgtggaccatcgtcgcctgggcgttcctcggtattggtatcacgctgggctcgtggtgggcctattacgaactcggctggggcggctggtggttctgggacccggtggaaaacgcctccttcatgccctggctggtcggcactgcgctgattcactcgctggctgtcaccgagaagcgtggcgtgttcaagagctggaccgtgctgctggccatcgcggcattctccctcagcctgctcggcaccttcctcgtgcgttcgggtgtgctgacgtcggtgcatgcgtttgcgtccgacccggagcgcggcgtattcatcctgatcttcctgctgttcgtggtcggtggctccctgaccctgttcgccctgcgcgccccggtggtcaagagccaggtcggctttaacctgtggtcgcgggaaaccctgctgctgggcaataacctggtgctggtggtggccgcgtcgatgatcctgctcggcaccttgtatccgctggtgctggatgcgttgagcggcgccaagctgtccgtgggcccgccgtacttcaacgcgttgtttatcccattgatgggcctgttgatggtggtgatggcggtcggcgtgctggtgcgctggaaagacaccccagtcaaatggctggccggcatgctgatgccggtgctgctgggcagtgtggccctggcggtgatcgccgggtttgcctacggcgacttcaactgggcggtgctcgccactttcctgctcgccgcctgggtgttgctggccggcgtgcgcgatatcttcgacaaaacccgccacaaaggcctgatcaaaggcctgccgaccctgacccgcagctactggggcatgcaaatcgcccatatcggcatcgccgtgtgcgccctcggtgtggtgctgtccagccagaacagtgccgaacgcgacctgcgcctggcgccgggtgagtccatggacctggccggttaccacttcatcttcgaaggcgccaagcacttcgaagggccgaacttcacgtcagacaaaggcaccgttcgtgtcgtgcgcaacggcaaggaaatcgccgtgctgcatccggaaaaacgcctgtacaccgtgcagagttcgatgatgaccgaagccgggatcgatgccggtttcactcgtgatctttacgtcgcactgggtgaaccgctgggcgacggggcgtgggccgtgcgggtgcatgtgaagccgtttgtgcgctggatctggttcggcggcttgctcaccggctttggtggtttgctggccgcgctggaccggcgttatcgggtcaaggtcaagagccgggtgcgtgaagccctcggcctgcaaggagcggcggcatgaagcgttggttgatggtagtaccgctggcgatgttcctggtggtggcggtgtttctgtatcgcgggctgtacctggacccggccgagttgccttcggcgatgatcggcaaaccgtttccggcattcagcctgccgaccgtgcagggcgacaagaccctgacccaggccgacctgctcggcaaaccggcgctggtcaacgtgtggggcacctggtgcatctcctgccgcgttgaacacccggtgctcaacaagctggccgagaagggcgtggtgatctatggcatcaactacaaggacgacaacgcagccgcgttgaaatggctggcggaattccacaacccgtaccagctggatatccgcgatgaagacggcaacctcggtttgaacctgggcgtgtacggcgccccggaaaccttcttcatcgatgccaagggcgtaatccgcgacaagtacgtcggcgtgatcgacgaagtggtctggcgcgagcagctcgccgccaagtaccaggccctggtcgatgaggccaagccatgaagcgtctgttagccgctgccgttttagcgttgggcctggcaagcgtggcccacgccgccatcgacacctacgaatttgccaacgacgccgagcgcgagcgtttccgcgacctgaccaaggaactgcgctgccccaagtgccagaaccaggatatcgccgactccaacgcaccgatcgccgccgacctgcgcaaggaaatcttccgcatgctgggggagggcaaggacaaccagcagatcatcgacttcatggtcgaccgctacggagatttcgtgcgctacaaaccggcgctcaccggcaagaccgcgctgctctggttcggccctgccggactgttgctggccggcgttgtcgtaatggccgtgatcgtgcgccgccgccgcgccgcgccaaccgatggttccgacgcgctgtcccctgatgagcgtaaacgcctcgaccaattgctggacaccaagactgatgattgatttctggctcgcagccggcctgctgcttctgattgccctgagtttcctgttgatccctgtcctgcgcgaccgccgtgcccagcgtgaagaggaccgcaccgcgctgaacgtggcgctgtaccaggaacgcgttgccgaactgcaagtgcagcaggacgaaggcgtactgaatcccgcgcaactcgacaccggccgcgccgaagctgcgcgcgaattgctggccgacaccgaaggcgtggaaaaaccccgcgaatcgcgcctgggcaagccgctgccgttgttggcggcgtttctagtgccggtcctcggcgttgccctgtacctgcattacggggccagcgacaaggtcgaactgacccgtgagttctcccagccgccggtgtccatggaagacatgacccgtcgcctggaacgcgccgccgctgcccagccggactctgcggagggcctgtatttcctcggtcgcgcttacatggcccaagaccgttctgccgatgccgccaaggtctttgaacgcaccgtggccctggccggccgccagccggaattgcttggccagtgggcccaggcgcagtacttcgccgacaacaaaaagtggtcgcccaaggtccaggcgctgaccgacgaagcgttgaagctcgacccgaaggaagtgaccagcctgggcctgctgggtatcgccgcctttgaaggtcagcgctatcaagaggcgatcgactactggaatcgattgctggcccaactgccaccggacgacaactcccgtgcggcgttgcaaggtggcatagatcgcgctgctgagaagctgaaagaaagcggcggtaccgtcgcccctcaaaaagccgcgatgaaggttcgggtagatctgagcgccgacgtgaaggccaaagccctgcccactgacagcgtgttcatctttgcccgtgcggtctccggcccaccggcgccattggcggccaaacgcgtcacggttgccgaactgccgatcaccgttgaactgggcgatgccgacgcaatgatgccgcagttgaaactgtccaacttccccgaagtccaactggttgcgcgcatatcccgggccggtcagccgaccactggcgagtggatcggccgcagccaccccttggccagcagcaccactgccttgcagcagctgaccattgacagtccggaccagtaatttcgaggaaacgcttatgaccgcactcgcccgaatcaccttgctcagccttgtattgggcctgagcgcatgtgcggtccaccgcccacctcctgcacccaccgggccgaccatcccgccgtccccgtcgacccagccgagcaccaaaccgtcgggcccggtgaccccgccgccgaagccggtgccgaccaaatcgccgacgttcgcgccgcccccaggtgccgccagccattgggacggcaagatgcaggtgtatgtgctggacgaccagcccgacaccttctaccgccagcgtacgtattaccgctggagcaacggctggagccgctcgatcagcccgaacgggccatgggaagacaccgacgtgcacggtgtgccgccggggttgagcaagcagtacgcgcaatgaaaaaaggcgacctattacaggtcgccttttttgcgctttaaaatccgctctctcaaccaccggagatcaaaggtgggagggggcttgcccccgatggcaatggggcattcagcccatcactgactgatccactgccatcaggccaccggacactcccgattcagcgcttcatccaccaacaactgcgcaatctcgatcatctgcaccaccgccaacacctgcttgcggcccgagccatccaagtgctcggcacagtcgtaggcacacacagtcgccgattccagcatctcgctggcattgctcaaggccgcttcggtgctgaggccggggcggacggtgaagatgaggtggggtggggtttgtggtgtgtcatccgaggtggatggcgggggatttggagtaacttttttcatgcagtaaatctccattcagttggagctcaccccatccgcgaccaagcagaagggtggcgagctgtacgcaggttggtcgaccagggaatggaaacccggcagggcctaggccctcccacgcacagctcgccataacgcgagcacaataatgccgcttgcgcggccctgtgcgccattctaatccaggcgaccaagcctgatcgctgatgagcagcgattgcgagaggctaatggtgcgttatagcaaccgcaaccgacagagaaggtaggaaaaatcgcatatgttgtggtgagcagggctgttgtggcgagcaggcttgccctgcgttgggctgcgaagcggccccaaaacctggcgacgggttctgtctgaaataacgcggtggtttcatcagggctgctgcgcagcccaacgcggggcaagcccgctcgccacagggttgatctgagtttcggtcaagtccaacctttcacaaaaccttcatccaaccgcccccctccagtcatgtgcaagtcatagggctgacacctcccgcgcctactgtcgtttgaactcaaccgcagccatcccaggctgttcaaacaagacagagaagcccatgaatcacgctatccatgtcgatcacttgaacaagacctttgcgaagaaatccgccttggtcgacctcgaactcaccattgccccgggtgagatggtcgcgctgattggcgcctccggttccggtaagtccaccttgttgcgccacctggcgggcctggcctgttgcgacaaaagcaacggcggcagcgtcaaggtgttgggccgggaagtgcaggccagtgggcgcttgaacggcaaggtgcggcggttgcgcgcggacatcggctatatcttccagcagttcaacctggtcaatcgcctgagtgtgctcgacaacgtgctgctcggttgcctgggccgcatgccgcgctggcgtggcagcctcggcttgttcaatgccgaagaaaaagcgtttgccctggagtcgctggctcgcgtcggcctggccgatctggcggcgcaacgggcctcgaccttgtccggcggccagcagcagcgcgtagcgattgcccgtgcattgacccagcgcgccgaggtaatcctcgccgacgaacccatcgcctccctcgacccggagtcggcgcgcaaggtcatggagatcctcgccgacatcaaccgccgcgacggcaagaccgtggtggtgaccctgcatcaagtcgattacgccatgcgttattgcccgcgtgccgtggccctcaaaggcgggcgcattcatttcgacgggcagggcagtgcgatgagcagccagttcctcaacgatttgtacggtgccgacgtcgacaccagcctgatgttttccgaccagacccgccacgccaccgccacccctcggctggccttggcgcgcgcttgaaaccttactcacgacccacaggaagcctttccatgttgaaccgtatcggccatgtgtttctgtctgccgtattgctggccagtgtcgcgctgggcaacgcccacgccgctgacaaggtgatcaacttcggcatcatgtccaccgagtcttcgcagaacctcaagagcatctggcagccattcctggatgacatgcacaagaagaccggcctgaccatcaacgccaccttcgcctccgactacgccggcctgatccagggcatgcgcttcaacaaggtcgacgtggcctggctcggcaacaaggccgcgatggaagcggtggaccgttccaacggcgagatcttcgcccagaccgccgccgccaacggtgccgccggttactggagcgtgttgatcgtgcgcaaagacagcccgatcaacaacgtcgacgacatgctcaagaacgccaagaacctgaccttcggcaacggtgacccgaactccacctcgggctacctggtgccgggctactacgtgttcgccaagaacaacgtggatgccgccaccgcgttcaaacgcacgctcaactccagccatgaagtcaacgcgttgagtgtggccaaggggcaactggacgtcgccaccttcaataccgagagctgggagcgcctggaagtcacccaaccggacaaggccgccatgctcaaggtgatctggaaatcgccgctgatccccgccgacccgatggtgtggagcaaggcgctgagcgacagcgagaaggccaagattcgcgacttcttcgcccactacggcgacaccgatgaagagaaggcggtgctgaagaatatgcagttgggcaagttcctgccgtccagcgatgaccagctgttgccgatccgccagttggagctgttcaagcagcgcaccaccgtcagtgccgacgacaagctggaggctgccgacaaggccaagaagctggcggatatcgacgccgacctggccaagctgcaacagcgcatctccgagctcgacaagaaaaccgcagccaacggttaacccctgtgggagggggcaagccccctcccacatttcgctcgaggacaaccatgactactttgcacgctgaagccgtcggcaaacgcacctggccgcaatacctcggctggggcctgttcctggtcctgctggcctgggcctggcacggcgcggaaatgaacccgctggcgctgtaccgcgactccggaaacatggcgaccttcgccgccgacttcttcccgccggacttccacgaatggcgcagttacctcaaggagatgatcgtcaccgtgcagatcgccctgtggggcacggtattggccatcgtctgctcggtgccgctgggcatcttgtgcgccgacaacatcaccccgtggtgggtgcaccaaccgctgcgtcgggtgatggatgcgttccgttcgatcaacgaaatggtgttcgccatgttgttcgtggttgccgtcggcctcggccccttcgccggcgtactggcgctgtggatcagcaccaccggtgtactcgccaagctgttcgccgaagccgtcgaagccatcgacccaggtccggtagagggcgtgcgggccactggtgccagtgccctgcaggaagtgatctacggcgtgatcccccaggtcatgccgctgtgggtcagctacgcgctgtaccgcttcgaagccaacgtgcgttcggcgacggtggtgggcatggtcggcgcgggcgggatcggcgtgatcctgtgggaaaacatccgtgccttccagttcgtccagacctgcgcggtgctgctggtgatcatcgtggtggtgagcctgatcgacgtgctgtcccaacgcctgcgcaagcagttcatctgacctcggaggagtgcccgcgcggcgctttttttaagcatgcagttgtctagacaagatgagccggtgtaccgcgaactcgcggatatcctgcgccgtgaattgagcagctacagcgccggtgatttcctgcccggtgaggtgcacatggccgagcgcttcggcgtcaaccgccacaccctgcgtcgcgccatcgatgagctggtgttcgaaggcagcctgttgcgtcgccagggcaagggcacccaggtgctcgaccggccgctgatctacccgatgggcgccgagacctcctacagtcaatccctgtcagcccagggcgtcggtgtgcaggcggtgttgctcaagcgccgctactgctacgccagccgtgaagaagcgctgcacctggggatcgccgaaatggcgccgatgatcgagctgcaaaccctgcgcaagctcgaccagcagcccgtcagcctgatccgccatcgctactgtgccagccgtgcgccgttgctggccgactacaccggcggttcgctgcgccagtacctgcgcgaacgcgacctgccattgactcgcacccacagccttatcggtgcgcgcctgcccaaccgtgacgaagccgcgctgctgatgatgcctcggcacttgccggccctcaccgtattcaccctttcccgcgatcgcgacggccacccggtggagctggcgcagtccaccagccgttcggatcgcttccagtaccaagtggtgacttgatggagaccctgatgaacctgtccccgcgtcagcattggattggtgtgctcgcccgcgcccaactcagtgaattgcaaccccacgaagcggccttgaaagacgcggagtaccagctcattcgcgccccggaaatcggcatgaccctggtacgcggtcgcatgggcggcaatggcgcaccgttcaacgtcggtgaaatgagcgtgacccgctgcgtagtgcgcctggccgatggccgcaccggctacagctacctggccgggcgcgacaaggtgcatgccgagctggccgccctggccgatgcccatttgcaaggcgcgcagccgagtatctggctcagcgatctgatcactgccctggcgaacgcccaggtcaggcgtcgcgctgaaaaagaggcggacaccgccgccaccaaggtcgagttcttcaccctcgtgcgaggagaaaactgatgaatgcgcaactgttgcaaccggcgtttgtcgacccggtattggacgcccagcgtggttttcgcgccgcgctcaaggccctggccgaaccggggttgatccagcacctgccatccgccccacacctcgagggcctggcgccggcgacgtacgcgttgtgcctggcactgctggacgtggacacgccgctgtggctttcaccgagcttcgacacgccgctgatccgcgccaacctggcgttccactgcggttgcccgctgacttcgcatcgcgaagcagcggtgttcgccttgctcggtgaacacgacctgctggatctgagcggcttcgaccacggcaacgaccgctaccccgaccagtcctgcaccttgctcgtgcagctcaccgacctggagtccggtcgcggcctgctctggcgcggcccaggcatcaagacccagcgccaggtgcacgtcccggtgccgcaggccttctggcaggaacgccaacggcgcaaaacctttccccgtggcctggacgtgctgtttgccgccggccatcacctgatcggcctgcctcgcagcagccgcattgcacaggagcatgcctgatgtacgtagccgtcaaaggtggcgaacaggccatcgacaatgcccaccgcctgctggcgaaaaaacgccggggcgataccgcgattccggaactgagcgtgacgcaaatccgcgagcaactgcccctggccgtggcgcgggtgatgaccgaaggctcactgttcgacgaagaactcgccgcgctggcgatcaagcaagcggcgggggacctggtggaagcgatcttcctgttgcgcgcctaccgcaccacgctgccgcgcttcagcccgagcctgccgatcgataccgcccggatgtcgttgagccggcgactgtcggccaccttcaaggacctgcccggcggccaactgctcggcccgaccttcgactacacccaccgcctgctggattttgccctgctggccgaaggtgagtacccggggccgcagaccgcgccggaggcgacgctggaagactgcccacgcgtgctcggcctgctcgccaaagaaggcctgatcaagaccgaaaccgacgacaacgcccgcgttgccgacatcacccgcgacccgctggaatacccggccagccgcgccgagcgcctgcaagccctggcccgtggcgacgaaggtttcctgctggcgctggggtactcgacccaacgtggctacggtcgcaaccacccgtttgccggtgagattcgtatcggcgatgtggaggtgtggatcgaaccggaagaactgggtttccccatctgcctgggcagcatcgaagtgaccgagtgcgagatggtcaaccagtttgtcggttcggctaccgagctggcgcagttcacgcggggttacggcctggccttcgggcatgccgagcgcaaggccatgggcatggccctggtggaccgctcgctgcgcgccgaggagtacaacgaagagatcgtctcgcccgcccagcgcgaagagtttgtgctggcccactgcgacaacgtcgaggcggcgggctttgtctcccacctcaaactgccgcactacgtggactttcagtccgagctggaactgatccgcaaactgcgccaaccggccgagggcccgagccatgaatgacgccgcgtacaacttcgcctacctcgacgaacagaccaagcgcatgatccgtcgcgccttgctcaaggcggtggcgatccctggctaccaggtgccgttcggtggccgcgagatgccgctgccttacggctggggcaccggcggcatgcaattgaccgccgcgatcctgggggacgatgacgtgctcaaggtcatcgaccagggcgccgacgacaccaccaacgcggtgtcgatccgccgcttttttgcgcgcactgcaggcgtggtcactaccgaagcgacccctgaagcgacggtgatccagacccgtcaccgcatcccggaaacgcccttgcaggcgaaccagatcatggtgttccaggtgccgatctcagagccgctgcgttttatcgaaccctcggaaaccgagactcgcaccatgcacgccctgaatgattacggggtgatgcatgtgaagctgtatgaggacatcgccaccttcggccacatcgccacggcctacgcctacccggtgacggtggatgaacgctacgtgatggacccgtcgccgatccccaaattcgacaaccccaaactcgacatgagcccggcgctgatgctgttcggcgccggtcgcgagaagcgcctgtatgcggtgccgccatacacccaggtcaccagcctcgactttgaggaccacccgttcgaagtgcagaaatgggcgcacagctgcgcgatctgcggcagccatgaatcgttccttgatgagctgattctggatgacgccggaacccagagttttgtgtgttccgacacgtggtattgcgcccagcgggtgaaggagaacaaccagtgagccagccgttattgcaagtgcgtgacctgtccctgttgtacggcccggagaagggttgccagggtgtgagcttcgatctgtaccccggcgaagtgcttgggattgtcggtgagtccggttcgggtaaatccaccttgctttcgttgttgagcgggcgcctgccgccgcacgcgggcagcatcggctaccgcagccaggacggcgaatggctcgacctctacagtgccagcgaagccgagcgccgcaccttgctgcgcaccgaatggggctttgtcgagcagaacccgcgtgacggcctgcgcatgggcgtgtcggccggcgccaacattggtgaacgcttgatggcccagggcgtgcgcaattacgcgcaactgcgtggcgccggtctggactggctggagcaggtggagattgacccacaacgcatcgacgacctgccacgcaccttttccggcggcatgcagcagcgcctgcaaattgcccgcaacctggtttccagcccacggctggtgttcatggacgaacccaccggcggcctcgacgtgtcggtgcaagcgcgtctgctcgacctgctgcgcggcctggtgcgtgaactggatttggcggtggtgatcgtcacccacgacctggccgtggcacgcctgttggccgaccgcctgatggtgatgcgtcgctctcgtgtagtggaaaccgggcttaccgaccagatcctcgacgatccacagcacccttactctcaactgctggtgtcttcggtattgcagccatgacaaatgccttgatcgaggtccgtgacctctcgaaaaccttcaccctgcaccagcaaaacggtgtagtactcaatgtgctgcgcggggtggagttcagtgtgcagggcggcgaatgcctggtgctgcacggtcagtccggcgcgggcaaaagcaccttgctgcgtacgctgtacggtaactatctaccggccggtggcagcattcgtgtacgccatgccggcgagtggctggagctggtgggcgccgcgccccgcgagattctgcaggtgcgccagcagaccctgggctacgtcagccaattcctgcgggtgattccgcgtgtggcgtgcctggatgtggtgatggagccggcgttggcccgaggctggtcgaaagccgaggcacaacagcgcgccgaacacctgctgacccgtctgaacatcccccagcgcctgtggccactggcgcccggtactttttccggtggcgagcaacagcgcgtcaacatcgcccgcggtttcatggtggcctggccggtgatgctgctggacgaacccaccgcctccctggacgaccacaaccgccaggtggtgctggaactgatgaacgaagccaaggctgccggcgctgcattgatcggcatcttccacgaccgtgccgcccgtgaagcggtggccgatcgccatttcgacatgacccccacgcctgttgcccaagaggaatacgcccatgcccgctgaacagatcctcagtaatgcccaggtcgtcacggctgatcgcatgttcctgggctcggtggtgttgcgtgatggcaagatcgtcgacctcgccgaaggccgcagccagttgccccaggcccaggacctgggcggtgatttcctgctgccgggcctggtggagttgcacaccgacaacctggaaaaacacatgaccccgcgccccggcgtggactggccgtcgacctcggcagtgctcagccacgatgcgcagattatcgcggcgggcatcaccaccgtcttcgatgcggtgtccatcggcgacgtgaaccccaagggcaaccgcatgaaaaaactgccggcgatgcttgatgccattgcccaggcagaaggtgctggcctgacccgcgccgagcaccacctgcacctgcgctgcgagctgtgccacccggacaccctcagtgtgttccgcgacctggtggaaaacccgctggtgcaactggtgtcggtgatggaccattcgccgggccagcgccagtttgtgcttgaagccaagtaccgtgagtactacatgggcaagtaccacctgaacgacgaaaccatggacgccttcatcgtgctgcaaaaggccaactccctggcctacagcgaccgctaccgtgcggctatcgtcgagcattgcctggcgcgtggtttgtcggtggccagtcacgacgacgcgacgctcgcgcatgtgcaggagtcggcacgctatggcatgaccatcgctgaattccccacgacgctcgaggcggcgaagggctgccaggcgttgaacatgaaagtgttgatgggcgcgccgaacgtggtgcgcggcgggtcgcactcgggtaatgtggccgccgccggcctggcggccgagggcttgctggatatactttccagtgactactacccggccagcctgttgcaggcggccttcgtgctggctgaccagcaagacggcggcgacctgtcgcgggcggtcaagatgatcagcctggcgcccgcgcaggcggcagggctgaaggaccgtggcgagattgccctcggcctgcgcgccgacctggtccaggcccgcaaccgcgaagggctgcctgtggtgcaacaagtatggcgacaagcgaagagggtgttttgatggcaggcaggttgatctatctcatcgggccgtccggctcgggcaaggacagcctgctggatgccgcacgcccacgcttggccgagcgcggttgccgcattgtgcgccgtgttatcacccgctcggcggaagcggtgggcgaagcggcgcagggcgtcagccccgagcaatttgcgacgatgcaggccgagggcgcgtttgccctcagttggcaggccaatggtttgttctatggcattcccagggagatcgacgattggctggcggcgggggacgacgtactggtcaatggctcccgtgcgcacctggcgcagactcgcaagcgttatccgacctcgctggtgttgctgctgacggtggaccaggcggtgttgcgccaacgcctgatcgcacgggggcgtgaagcgttggcggatatcgaggcgcgcctggcgcgcaatgcgcggttcaccgccgagctgatcgccggcaacggtgcggggttgttcgtactggataactccgggccgctggaacatacggtcgagcgcctgctgtgctgcatcgatcacgggcactcggcatgcgcctgaccttgctcggcaccggtgacgcgcggcaagtcccggtgtatggctgtgagtgcgccgcgtgcggtctggcgcgcagtgatgccagcctgcgccgtcgcccgtgcagcgcgttgatcgaatgcggcgaccagcgctggttgatcgacagcggtttgcccgaccttaccgaacgcttcccaccgcgcagtttcaacgggatcttgcagacccactatcatgccgatcatgcccagggtctgttgcacctgcgctgggggcaagggctggtgattccggtgcacgggccggtggatgccgaaggtttgtccgatctgtacaaacatccgggcatcctggatttcagccagccattcagcgaatttgaaacccggcagtttggcgaactgagcgtcaccgcgttgccgttgcagcattccaaaccaaccctgggttacctgctggaaggcgaggggcgacgcatcgcctacctcaccgacaccgtcggcctgccgcctgcgaccctggcctggctgcaacgcgaacccctggatgtactggtgctggactgttccatgccgccgcagccgcaggcaccgcgcaatcacaatgacctgacgctggcgttgcagagcatcgagcaaaccggtgcgcagttgggcgtgctgacccatgtcgggcacacattggatgcctggctgctggagcatcgccgcgagttgccacggcaagtcacggtcggctgggatggccgggtcatctgaacgccaaaggttccacagaaccctacttcgtcagtaacccttcaacgtattcgataaatgccttggctttggcacttggcattcgacccgtcggcaataccgcccacaggtccttgggcggcagttcccaatcggtcaacacggctttcacctcacccctggccaattctggtgagaacatccactcggacgtcatcgccaggccatggtgggcgagcacgcctgcgcgcaagccttcggaagaggtaacacgcaagcgtcctcgagcggcgatggcgtgttcgtgcgggccttgtttgaatgaccagagcgggctttccccgaggctgtagatcaccgcctggtggttgaggatatccgccgggctttgcggttcgccgaaacgttcgaagtaggccggtgtaccaaacacccggcttgggctttggccaagccggcgggcagtgaggccggagtcactcaggttgccgatgcgcagggcgacgtcgatgccgtcttcaaccaggttgaggaggcggtcgtcgagcaacacgtcgatgttcaggccagggtgttggtccaggaacggtcccaggttaggaatgatccgcatacgggagaacgtcacgccggcgctgacccgcaggttgcccgtcaagccagcgcctgcgccacgggcggcctcgtcagcttcatcggcttcgaaaatggcgctcttggctttctcgaaaaatgccaggcctgcctcggtgggggtcaggcccctggtcgagcgcagcagcaatcgcacggccaggcgggcttccaattgcgcgatgcttttggaaacggcgggttggccgatgcccaggcgtttggcagcggcggagaaggagccggtctcgacgacgtgaacgaaggtttccatggcagtgagacggtccatcgggcgttcctgttagctgggcggcgctcaagcctaaggcgctggactagcggtgtcatgcgtttcccgtgttgcgccggtgagttttcaatattcggtaaaacagccgtcagtcaggcatgcgcattttgtgcttgagtaaagataactctagggttacttttattcaggccaagccaaggaggcgagggtgcaaagcaggctattgatcaaggaactgcaagaggcgggttgggtattggatcgggtcacgggcagccatcacatttttacccatcgttacagcccgtacacgattcccgtgcctcatcctaaaaaagacttgccgttgggcactgtcagaagcatcaggaaacgcgccgggctatttgatttttaaggagagcattcatgcaatacccaatctgtatcgaatggggcgatgacttcaccgccaccggtatccagatccccgatattccaggcgcagtcaccgccggggacagctttgaagaggcctacaacgccgccgtggaagtcgcgcacatcatgctgcaagagatcgccgcagagggcggggccattccgatgccaacgtcggtcgcccattatcatgcccatgaggactacgccgggatgggctggggcatgttggagttggacgtcacgccctacctgggtaaaaccgagaaggtcaatgtgaccttgcccggttatgtcatccagcgcatcgaccggtatgtacgggagcataaggtcaaaagccgctcgtcattcctcgcggacgcggcgttggaaaaattggtgcggtcctagggcgatcaggcggtgtcaggtgtcggtcgcgtacgttgtcggatgagcacggttttttttgcgcatctttttccgggcatgtttgagtcagtttccttatgtttgaaattaagattttgattgaaataagggagtgtttgacaagtttttttcctctagaaatcaacttagtagtgttgttgatatgtcaggagagttgggccgatcagtgattgagtgtgttttctttgcaggtgtgtttattaagtgtttttgaaaagaaccagcactggcgaacgtgtcattgatttgagaattttagcgtcctgccaatggactggtcagcgttagtatttttcatccatggacgaatggctcttcactgttcagagtattcatcgtcatgcactttcctgtcaggcaaccttcacagcaaccccctgcgcttgcgccgaattcccttttgtcagcgtttgataacgacgccttgcactggggaaacaataagaagtcgttcagtaccgcgcaggcggctaaacatatcactcgaggtaacttcaagtttcatgatcgggacggggataataaggtcgtggtgggcttcagtttttccggcgtctttacctcggcccagaaagagcgcgccaggcaggcattgaaagcctatgccgatgtcgccaacatttcctttgtcgaaaacagcgctcatacggatggcggcatagtcatcaggggcgtgccgggttcctggtcaggctgggcggcctctcccagtcagtaccagccgaacgtaacggcgaatgtggggacgggaggcgcaggcgccaaccctgaaatgggcagtcatttcttgtctttgttggtccatgagttggggcacaccttgggcctggaacatccgggcggttacgacggcggtgggacttacgaggccaatgccgattatgcgcaggacaccaaggcccgcagtgtcatgagctattggtcggaacgcaaacaaccggggcatgacttcaacgaacagcaacccgctgcccccatgatggacgatatcgccgcgctccagcgcttgtacggagcgaatacgcgcacccgtgccaccgacaccgtctatgggttcaactccaacaccgagcgtgagcactacagcctcaggagcgcccgcgacaagcccgtgttcagcgtctgggatggcggtggcgaggacaccctggatttctccggctttaccgataaacaaaacatcaacctcaatgccgaggcgttttcggatgtgggcgggctgcgggggaatgtgtcgatcgccaagggggtgagcgtggagaacgccattggcggttccaacagcgatgtgttgacgggtaacggcgccaataaccgcttgaaaggggctggcggcagcgacacgttgcgcggcggtgccggcgccgacacattcgtgtacgcccgcgtcagcgactcaacaccccaggctcccgattttattcaggacttcaccagcggtagcgacaaaatcgatgtggctggcgtgctgcgcgaggccgggctcacgtcgctgaacttcatggatagcttcagcgggcgtgccggcgacgcggtgctcagtcatgacaccacaaccgggcgctccacactggccgtggataccacgggcaacggcacggctgacctgctgatcagcagccatggtcaaatcaaacaggaggatgtgatctggagtggtaatggggagcccgcagccgtgacgcccgatcagacggctgatctcacgctggagccggacccggatcctgcgcctgactcaacgtcacagccggatccgagtacgacgcctgggcctgcgtcttggtttggtgagcgggtgggcaaacagatagcttcaggtatctcgcttttcgcgaactggatatccgggtggttcaggtgagttcaaggtttatccaataagcccaccgaatcctcacgggaaacactcagaaagcgcagcaatgccaccaacgggaatgcactacccaccagcatcacacccagccagccgccgtgttcatacacgctgctggcaatcgccgagccgaatgcgccgccgatgaagatgctggtcatgtacagcgcgttcaggcggctgcggctgttggcgtcgagggcgtagatcgcgcgctggccgagcaccatgttcatctgcacgcagaagtccaggaccacgccggtcacggccaggccgatcacgctgtacagcgggtgcacgaaggccggcaggaagctcaacgcggcgaacaacatggccagcagcgaagcgcgatgggtgtgaccggcatcggccaggcgaccggcgatgggtgcggcaatggcacccagcgcaccgaccagggcgaacagggcgatctcgctttggctcaggccgtggttgcgcgccagttccagtggggcagcggtccagaacaggctgaaggtggcgaacatgcagccctggtagaacgcccgttgacgcagcaccggttgctgacgcagcaaggtgccgagggagcgcagcagttggccatagctggcagagtgatccggctgacgcttgggaatggtcagaatcaacaccacactgataaacgccatcagcgccgccgccgccatgaacatcgcacgccagccgaagtggtccgcgaccacgctggacaccggccgcgccagcaggatgccgagcagcaggccacccatgatgctgccgaccacacggccccgtgattcggcgggcgccaagtgcgcggccaacggaatcaggatctgcaccgacaccgaactgaagccgatcagcagcgacaccagcaggaacaggttcggctgctcggtgaccgctgcgcccagcaggctggcgatagcgatgacggtggtggcgatcatcagtttgcggttttccagcaagtcgcccaggggcaccaggaaaaacagccccagggcgtagccgatttgcgtcagcgagacgatcaggctggccatggccggcgtgaggccgatgtccggcgcgatcagctcgatgatgggttgcgcgtagtagatgttggcaacgatggcgccgcagcaaaacgcaaacagcatcaccatgctccgggtcatggtgcttgtagcgtgggaagtagcgttcatggtgttctcataaaagcgaaggaagtggggcgagcctaaagacaacaccgtagcccgggtaggccgctggcagtgataacactcatgcccggtaatgatgagtgaatcgttaactttctgcgcgaacgctgatgatacattcaggcaccactgccgaaacaggaaatccattgcaatgaagatcacgttgaacaagatgctcctggcttccacgctcgccgccgccatggccgtgggcctggcccaggctgccgagacgcctcgcgtgggcgtacgcggcgccattacggcgatggacggggacgcgatgcatgtcaaggtcaacagcggcgaagaagttgtcgtgcacttgacccaagacacccaggtgcgcgcggtcaccctggccaaaatcgatgaaatcaagccgggcagctacatcggctcggccgccatgcccaacgacgacggcagcctgacggcgctggaggtgcacgtgttccccccggcgatggccggcacgggcgatgggcatcgtgcgtttgatttgaaagaaggcagcagcatgaccaacggcaccgtcggcgacctggtggtgagcaacgggcgcacgctgacggtgaaatacaaaggtggcgagcagaagatcgtggtgccggaagatgtgccgatcgtgaacctggagccgggtgaccgcagcttactcaagccgggggtgaaggtggtgctgtttgccgcgcagggggcggatgggacgatcactgcccaagcgatctccgccggcaaggatggcgtgacaccgccgatgtaacggccaaatacagagccaaatgtgggagggggcttgcccccgatagcagtgtgtcagccagcggataaaccggctgatacaccgccatcgggggcaagccccctcccacatttatcaattactggccgctgtagatctggtcgaacaccccaccatcgttgaagtgggtcttctgcacggtgcgccagtcaccaaaggtcttctctaccgacaggaagtcgactttcgggaagcggtcggtgtacttggccaatactgccggatcacgtgggcgcaggtagttgttggcggcgatttcctggccttgcggtgaccacaggtacttcaggtagtcttcggcggccacgcgggtgcctttcttctcgaccactttgtcgaccaccgacaccggcggctcggcttcggcggaaacgctcgggtagatcacttcgaactgatcacggccgaattcacgggcgatcatctcggcttcgttctcgaaggtcaccagcacgtcgccgatctggttggtcatgaaggtggtggtggcggcacggccaccggtgtccagtaccggggcttgtttgaacagcttgccaacaaaggccttggccttgttttcatcaccgccgttcttcagcacatagccccaggccgacaggtaggtgtagcggccgttacccgaggttttcgggttgggcacgatcacctgcacgccatctttcaacaggtccggccagtctttcagggctttcgggttgcctttgcgcacgatgaaaacggtggccgaggtgaacggcgcgctgttgttcggcaggcgggtgacccagttgtccggcaccagtttgccgttgtccaccagggcgttgatgtcggtggccatgttcatggtgatcacgtcggcgggcaggccgtcgatgaccgaacgcgcttgcttgctcgagccaccgaaggacatctgcagggtcagcttgtcgttcgggtgctcggcttcccagtgtttctggaacgcggcgttgtagtccttgtagaagtcgcgcatcacgtcgtaggagacgttgagcagtgtcacgggggcagcctggacggcgcccgccagggcaaggccggcggccagaagggaggcgctaacgagttttttcactgctcattccttgttgttcgagaaggttgctgattgagtgggggcaatttgccagcgactatagctggcgtcgcatagacgcttaaagattaaaacgaactttgcttattccactttcttgaaaagattactgccacagcgtgagcagaatgcagcgttcggctcatgactgtctttcttgcacaccgggcagtcatgctgcaattgctcaccgcgcatggcactggccagttcggcggtgaaaataccggtgggcacggcgatgatcgaataaccggtgatcatcaccagggacgaaatcacctggcccagcggggtcttgggcacgatatcgccaaagcccaccgtcgtcagggtcacgatggcccagtagatgcccttgggaatactggtaaacccgtgctccgggccttcgatcacatacatcaaggtgccgaacaccgtgaccagggtgcatacgctcaccaggaacaccacgatcttctgcttgctgccgcgcagcgccgccatcaggtaattggcttgcttgaggtaggggctgagcttgagcacgcggaaaatccgcagcatacggatgatgcggatgatcagcaggtactgtgcatcgctgtagtacagcgcgaggataccgggcacgatggcgagcagatccaccaacccataaaagctgaaggcgtagcgcaagggtttgggcgaacagtacagacgcagcccgtactcaatcaggaagataagggtgaacccccactcgatatacgccagcacgtcagcgtagttctggtggatctggtcgatgctgtcgagcatcacgatcaccaggctggcgaggatgatcagcagcaggatgccgtcaaagcgccgcccggcgaccgtgtcactttgaaaaaccatgacgtagagccgctggcgccagtcgttgttgctgtccataaagcccgcctgaatcgaatatcgagcaagcctagggggattcgaaggggctgtccatgcggggtttctgcagcactcgagtaccggcgcgcaccagccagcaggcgaggatgaacggcgcggtcaacgcgggcaggtgcacagcggcaaagcctggggtgaggaggatcgccagcaggatgccgagcagcggcagccagggttggcgacgcacctggctcaatgccacagccgccaacgccgggttgtagctgtgcaggccgaggagggcactggcgggttcgtccagccacagtgcgagcagcacgccgacactggcgcctatcaacgcccatatggcggcgcggcggttggccagccacaggcccagtgcaatcagcgcacccgccaccggttgatccagcagcatgacctgcgcgagcccggtaaaaggcgcggtgaggatagccaaggtgtcgggttcgctcagggcaaacgtgttctgcggcaccgtgcccagcaacaaccagcccaggccgacaaaaggcacggtgtaagcgggcaagtcattgggctggtcggcgtgtttcaaccattgccgtgtcaacatcgccgccagtccgccgcacgcaaggatcagcggcggcagcaacgccgaccaggcgaagtgctggctgatcaataagcccagcagcacgccgttgtagctgtaaaggccggcctggcgttcggccttgggataaccgcgacgctgggccgtgagcaaccccgccacgccacccagcaatgctccgccgaacaaggccggggcgccgatcaggattgccagcagacacagcaggccgcacagcggctggcgctgcaggaagatctggctgaagccgttgagcagcgcttcggcccagtcggggcaggttgggttgtgcatggtggttagtcagtgggaccgagtcgttcccatcggaggcaagccccctcccacatttgaatctgtgaacccaatcaagtgtgggaggggcggtgcgacgattcgacttgcccccgatgaggcccttacagacgctaaatcaacgtctcgatacgcagcgagttggtcgaccccggctgcccgaacggcactcccgcggtaatcaccaacgtatccccgcgctcagccatgccctgtgcctgggcgatctccagcgccgtggaacacacctcgtctacctggcgcaggcggtcattgaccaccgaatgtacgccccatgccacgctcaagcgccgtgccgtggacaggttcggcgtgaggttgaggatcggcgccaccggccgctccctggccgcgcgcaggctggaactgcccgactcgctgtagttcaccagcaccgctaccggcaggatgctgctgatgcggcggatcgcgcagctgatggcgtccgacaccgtggcgtccgccttgggtcggttgacgtcgagctgggtctggtaatccgggccgttttccacctggcggatgatcttgctcatcatctgcacggcttccagcgggtactcgccggacgcggtttccgccgacagcatcaccgcgtccgcgccttcggccacggcgttggcgacatcggtgacttcggcacgggtcggcgccggcgagaagcgcatcgactccagcatctgcgtggccaccaccaccggtttacccagttggcgacagatgcggatgatgtctttctgaatctgcggcacgctttcggccggcacctctacgcccaggtcgcctctggccaccatgattgcatcgctcagttcagcgatttcccgcaggcgctgcacggccgagggcttctcgatcttggccaacaggaaggccttgtcgccgatcagttcgcgggcttcgcggatgtcttccgggcgctgtacgaacgacagcgccacccagtccacgcccagttccaggccgaagctcaggtcgcgccgatccttggcggtcaacgggctgagttccaacaaggcttgtgggacgttcacgcctttgcggtccgataattcgccgccattgagcacggtggtgtcgatggcgtcagcatgcttggtgatgacccgcaggcgcagcttgccgtcgtccagcagcaggtccatgcccggttccagcgccgcaatgatttccgggtggggcaggttgacccggcgctggtcgcccggcgtcgggtccaggtccaggcgcagggcctggccgcgcaccagttgcaccttgccctcggcaaagcgcccaacgcgcagcttcggcccttgcaggtccatgaggatgcccaacgggtagttcagttggcgctccacctggcggatccactggtagcgctgggcatggtcggcatgatcgccgtggctgaaattgagccggaagatattcaccccggcttccaccagttcgcggatgtcgtcgataccatcggtggccgggcccagggtggcgagaattttgaccttcttgtcaggcgtcatggtgggcagtctcaaggatcaggatggcgcggaagtcgttgacgttggtgcgtgtcggctcggtgacgatcaacccgtcgagggcagcgaaatagccgtagccgttgttgttatccagctcatcgctggccgacaggccgagggcttcggcgcggcggtagctgcacggggtcatgagggcgccggcgttgtcttccgagccgtcgatgccgtcggtgtcaccggccagggcgtacacgccgggcaggcccttgaggctgtcggtgaggctcagcaggaactccgcgttacgcccgccacggccattgccacgcacggtgacggtggtttcgccaccggacaggatcacgcacggcgccgccagcggctggccgtgttgcacgatctgccgggcgatgccggcgtgcaccttggccacgtcccgcgcttcgccttccaggtcgccgaggatcaacgggctgaacccggcctggcggactttgaccgccacggcttcgagcgattgctgcgggcgggcgaccaattggaagtggctgcgcgagagcaccgggtcgccgggcttgacggtttccgaggccgggtccagcaaccaattgcgtactgaggcgggggcgtcgatgtggtagcgcttgaggatcgccatggcctgttgcgaggtgctcgggtcgccgaccgtgggcccggaggcaatcaccgtggcctggtcgcccggcacatcggaaatcgcataggtgtagaccgtcgccggccatgccgctttcgccaggcggccgcccttgatcgccgagaggtgcttgcgcacgcaattcatctcaccgatggtcgcgccggatttgagcagggctttgttgatggcctgtttgtcggccagggtgatgccctctgcgggtagggccagcagggcggagccgccgcccgaaagcaggaaaatcacgcggtcgtcttcgccgaggttgctgatcagtgccagcacccgctgggccacagccaggccggcagcgtcgggcaccgggtgggcggcttcgaccacttcgattttcttgcacggcgcgccgtggccgtagcgggtgaccaccaggccgctgacttcgccttgccagcagttctccacgaccagtgccatggcggcagccgctttgccggcaccgatcacgatcacacggccgctgcggtcggcgggcagaaagggttcaaggacttgccgggggtgtgcggcgtcgatggctgtggcaaacagctcgcgaagcaggtgttgcggatcgaccgacataagcgggctcccggggatttttgttattagaggtgcgtcaatttcaggcttggaatggggtcaaattgtgggagggggcttgcctcctcccacatttgattgcatttcatcaggggttatttatcgcgaatcgagaagttcgccatatgctccaggcccttgatcagcgccgaatggtcccagttgccgccgccaatcgcggtgcaggtgctgaacacttgctgggtgccggcggtgttcggcaggttgatgcccagctccttggccccggccagtgccaggttgaggtccttctggtgcaggttgatgcgaaagcccggatcaaaggtgcccttgatcatacgttcgccatgcacttcgaggatcttcgacgaggcaaaaccgcccatcagcgcttcacgcaccttggccgggtcggcgccgttcttggaggcgaacagcagggcttcggccaccgcctggatattcagcgcgacgatgatctggttggccaccttggcggtctggccgtcgccattgccgcccaccaacgtgatgttcttgcccatggcctggaacagcggcaaggcgcgctcaaaggtctgcggctcgccaccgatcatgatgctcagggtgccggccttggcgccgacttcaccaccggacacgggcgcgtccaggtactgcgcgccggtttcgttgatcttcgcggcaaacgccttggtggcggtgggggagatcgagctcatgtcgatcaccaccttgtttggcgacaggcccgcagccacgccgtctttgcggaacagcacgtcgtcgacctgtggggtgtccggcaccatcacgatgatgaactcggcttcctgcgccacctgctgcgggttcgccagggcgacggcgcctgcgtcgatcagggcttgcggcgccttgccatggtgttcggagaggaacagttggtgacccgctttctgcaggttcgcggccatgggttggcccatgatgccggtgccgatgaatccgattttagccatgaaaaaatcctcttgttattacaccgcaagtccactgtgggagggggcttgcccccgatgacggtgtgtcagataaacagtgctgacagacccaccgcgatcgggggcaagccccctcccacatggagtttgcgtggtgtttgttagatcgcgttgtgggtcttcaaccaacccaaacccgcttcggtggtggtcaagggcttgtattcacagccgacccagcccgtgtagccgatgcggtccaaatgttcgaacaggaagcggtagttgatctcaccggtgcctggctcgttgcgccctgggttgtccgccaactggatgtggttgatctggcccaggtgcgcagccatggtgcgggccaggtcgccttccatgatttgcatgtggtagatgtcgtactgcagaaacaggttgtcactgcccacctgttcgcgaatcgacagggcctgcgccgtgttgttcaggtagaagcctgggatgtcgcgggtattgatcgcttccatcactagcttgatgcccaccgcttgcagcttttcagcggcgtacttgaggttggcgacgaaggttttttccagggtctcgtcatcaacgccttgtggccggatgcccgccaggcagttgatctgggtgttgcccagcacttgggcgtaggcgatggccagcttgaccccggcacggaattcctcgacccggtccgggtggcacgccaggccgcgttcgcctttggcccagtcaccggccggcaggttgaacagcacctgggtcaggccgtgcgcatcgagttgtgccttgatttcagccgagctgaattcgtaagggaacaggtactcgaccccttggaacccggcatcggcggcggctttgaaccgggcaagaaagtcctgttcggtaaacagcatggacaggttggcggcgaaacgcggcatagggttctccttaatcgagcagggaaatggcggtcggcgcatcgttgccgaccagggccagatcttcgaattcattgacggcgttgatctcggtgcccatggaaatattggtcacgcgctccagaataatctcaacgatcaccggcaccttgaattcttcgatcattgcctcggcacggcgcagggccggcgcgatctggcctggctcgaacacacgcagggccttgcaacccaggccttcggcgacggccacgtggtccacgccgtaaccgttgagttccggcgcgttgaggttgtcgaaggacaactgcacgcagtagtccatttcaaacccgcgctgggcctggcggatcaagcccaggtaagagttgttcaccaccacgtggatatacggcagcttgaactgcgcgcccacggccagctcttcgatcatgaactggaagtcgtagtcgccggacagcgccaccaccttgcggctcgggtcggccttgaccacgccgagggcggcggggatggtccaacccaatgggccggcctggccgcagttgatccagtggcgtggtttgtacacgtgcaggaactgcgcaccggcaatctgcgacaggccgatggtgctgacgtagcaggtgtctttgccgaacacctggttcatctcttcataaacacgctgtggcttgaccggcacgttgtcgaagtgggtcttgcggtgcagggtggccttgcgctgctggcagtcgtgcagccaggcactgcgatccttgagtttgccggcagctttccactcgcgggccacttcaatgaacatcgtcagggcggagccggcgtcggaaacgatgcccaggtccggggtgaacacgcggccaatctgcgtcggctcgatgtcgacgtgaatgaatttgcgaccctcggtgtacacctccaccgaaccggtgtgacggttggcccagcggttaccgatgcccagcaccacgtccgacttgagcatcgtcgcgttgccatagcggtgggaggtttgcaggccgaccatgccgaccatctgcgggtgatcgtccgggatggtgccccagcccatcagtgtcgggatgactgggatgccggtcaactcagcgaattccaccagcagctcgctggcgtcggcattgatcacgccgccgccactcaccagcagcgggcgctcggcctggtccagcagggccagggctttttccacctgcacgcgggtggccaaaggcttggccaggggcagcggctggtaggcgtcgatgtcgaattcgatctcggccatctgcacgtcgaacggcaggtcgatcagcaccgggccggggcggccggagcgcatttcatagaaagctttctggaaggcatacggcacttggccgggctccaggacagtggtcgcccacttggtcaccggcttgacgatgctggtgatgtccacggcctggaaatcttccttgtgcatgcgggcgcggggcgcttggccggtgatgcacaggatcgggatcgagtccgccgaggcgctgtacaggccggtgaccatgtcggtgcccgccgggcccgacgtgccgatgcacacgccgatattgccggccttggtgcgggtgtagccctcggccatgtgggaggcgccttcaacgtggcgagcaaggacgtgatcgatgccacccaccttctgcaaggccgaatacagcgggttgatcgcggcgcctgggataccgaaggcggtgtctacgccttcacggcgcatgacgaggacggcggcttcgattgctctcattttgctcatgattttggtgcctcttgcgttttgtaattgtatacaagtggtgtctgtccaaagtgtattcacggcgggctgcgcaggtcaatgcattttataaactggcctttgcgttcgtcggaacggcttttttcgacgtatggagcctttgtgcgaaaatattgtatacaaaaaataaagtcattgtgttctatttgttgggtcgagcatctgatcattcagacctccaccgctttcccaataacaaaagaaggacggcaccatgagcgctttaaccttgaaaattgccacccaactggccagtcaggcccttgctgcagggcgcagtgttgcggcggcgccgctgactatcgcggtactcgacagcggcggtcacttgatcgccctgcaacgggaggacggcgcgagcctgttgcgcccgcagatcgccatcggcaaggcctggggtgcgattgccttgggcaaggggtcgcgcttgttggcgctggacgcacagcaacggccggcgtttatcgccgcattgaacagcctggggcagggcagtgtggtgccggcgccgggtggggtgttgattcggaatcaggaaggcgtggtgctaggggcgatcggcatcagtggggatacgtcggatattgatgagcagtgtgcgattacggcgatcgaaggggtggggttgatggcggatgccggggtgtctgcttgatgcttcgttgactgttcgggcctcatcgggggcaagtcgaatcgtcgcaccgcccctcccacacttgaattgcgaacaccgtcaattgtgggagggggcttgcccccgatgggcacagacaccacggtgtgtcagtccggctcacaacccttgagcaccaaccggatgatggtctgcgctgcggcttcgtaatcggcctcatccagcttggccttcccggtcaccgccgagatctgccagtcaaagtccgcgtaggtctgcgtggccgcccagatgctgaacatcaagtgattggggtcaatcgccgcgatcaggccgcgatccacccaatcctggatgcacgtaatgttgtgcttggcctgggcgttcaactgctcgacctgatcagcgctcaggtgcggggcgccgtgcatgatttcgctggcgaacaccttggaggcgaacggcaggtcacgggaaatgcggattttcgagcggatgtagttactcagtacttccttggggtcgccctgcggattgaatggcgtggacgccgccaggatcggctcgatgatgctttcgagcacctcgcggtagaggttgtccttggacttgaagtagtagtagacgttgggcttgggcagcccggccttggcggcgatgtcgctggttttggtcgcggcgaagcccttgtcggcaaactcctcgctcgccgcccgcaggatcttttctttgttgcgctcgcgaatggtgctcataaacctggagtttccttgccaaggctggcggttgcgcatggtagcaccggccatccgcgagcctcaacaatctgcccgtcggcccttgcgccgcgttatgctcgcgccatctcactcttacggaagcccgattcatggcaggaagcagcttgttggtattgatcgacgatatcgccgcggtactcgatgacgttgccctgatgaccaaaatggcggcgaagaagaccgccggggtgttgggcgatgaccttgcactcaatgcccagcaggtctccggggtgcgtgccgaacgggaaatccccgtggtgtgggcggtggcgaaaggctcgttcgtcaacaaattgatcctggtgcccgcagcactgttgatcagtgcattcgccccgtgggcggtgacacccttattgatgctcggcggtgcctacctgtgtttcgaagggttcgagaagctcgcgcataagtttctccacagcaaggaccaggaccaggctgaacacgcgcagttggccgaggccgtggccgatccggcaaccgacctggtggcctttgaaaaggacaagatcaagggcgccatccgtaccgatttcatcctttccgccgaaatcatcgccatcaccctcggcaccgttgctgacgcgcccctgatgcagcaggtgatcgtgctgtccggcatcgctatcgtcatgacggtgggcgtctacggactggtggccggtatcgttaagctggatgacctgggcctgtggctcacccagaagcccggccaggtggcgcgcagtatcggcggcggcatcctgcgggcagcaccgtacatgatgaagagcctgtcggtgatcggtacggcggcgatgttcctggtcggcggtggaatccttacccatggcgtgccggtggtgcatcactggatcgaaacggtcagccagggcgtgggtggggtggcgtggttggtgccggtgttactgaatgggatggtggggattattgccgggtcggtggtgctggcggtggtcagcatggtcggcaaggggtggaaagcactgaaggcctcatatgggaaataaaaaggccattcaaacgaatggccttttttgcgaacaggttttttgagtgcagtgctgacactgtcaggtagtgttcgcgcagacttccactgactaggctgatagcgttgagtgctgagggatgagcgaacctaggagcttgtcaaattcagaaccgggttcagccatttcacctaccccatgaaatgccttaagggtcatcggggttttggctccgtcgatggttttattaccgtttcgatcatgggatttgacccattgatcggcgtcgcgaagggatgcggccctatcttctggactgcgattcacatcgtcccagtcgcctacgcgtgccttaatcaaattgttaagagtagtgacatgatgttttttagtcaggggatctatgtaactgattttatggtgtaggtgagtgcctagtgaagaaagataaggggtgttttctgctttttcagtggtcatgccgtcgcgctgagtttcggaaatgaggtattcataaaacttttgaagttcagagccaggttcagtcaattcagacactgagtgatataacttacggctcgtatgcgttttggcaccgtcgatctcgtgattaccgttttgatcaaaattcctgactatgtcattggctctcagacgggaaatctgattttcttttgtaccgcgacgctcatcgtcccagtcacctacgagctgcttcaacatttttatgggggtagtaaacgtttcctcattagtcaccgggtcaaagtgcacgatgtgttgattgagggtgcggcctggtgaagaaagataaggggtttcatctggtttctctttcatcacgttctcggaatgattcgaggcctgtgaagaaagtgcatgtgccgcatagaaaggttgctgggcggcgggggttatagggagcgacatgtcatattccttgtgtgatgttgaatgtaacaggtgttgagaatctagtctgtttccacaaggtgagtggtgaatgagaggacgtggttcataaaatatatattttgtttcaattatgagaaatgcgttttgacgggtatgggatctttcgttgcaatcgtaggggtgggagctgatgtagcaataagagtcggggatgtcgggttttgttaaggggttgatgtatgaggtttattgatcgagtgtaaataataatttctggaatatttcagattgttgtgtgaattgcatcaggtacatcatttgatgcgcagtgccgagtgtgtttttgtgatcgagtggttccacagataagtaggttggaggaagggggctagtagtgtgcagggatgatggaaataaaaaggccatccggattgctcgaatggcctttttcttactgagcttcttttactcagctatttgtaactttcgagactcggtatatatataccgcaccttctcatactcaaacggcgagttcatctgcccataccggaagctggtctgataacgtttatccaccgcacgcaacgcccagatttccgggtggttggagctgacttccgacacgttgaggaagttgatctgggtttccgcgccgtagtcgacgatcaggccggtggtgtcgcgcaggttcgacgggccgaagatcggcagcaccaagtacgcgccgccgggcacaccgtagaagcccagggtctggccgaagtcttcgctctggcgcggcaggcccatggcggtggccgggtcccacaggccggcgatgccgatggtggtgttgagcagcaggcgcccggtggtttccagggagcggtggcccttgagttgcagcaggctgttcagcaggttgggcacgtcgcccaggttgttgaagaagttgctcacaccggtgcggaggaagctgggtgtcacataggtgtagccattgaccaccggcaggaacacccattggtcgaagcggtagttgaagtggtacacgcgacggttccacgactccagcgggtcatacacgttgagtgcggtgagcgacgagcgctcgaactcacgctgatccaggcctgggttgaacttgagcttgctcagcggttccttgaaaccgtcggcgtccacgttgaccggctcatgggccttgctgttgtcggcattggccacgcctgcgcacatcaaggcggcaagcagcagaagatatttagccacggaagaactccagcatggcgtcggcgttgacgcggtaattgaggttgccgcagtggccgcccagcgggtagacggtcaagcgatcgccgaaggttttacgcaggaaaccgaggtcgccagggccgaggatcacgtcgtcggcgttatgcatgacggcaattttcgggctgttgtgcaggtagtccttgagggcgtacaggctgacctggtcgaccagttgcaacaggctgccgccgtcggagcgtgcgcgccacatcggaatcacttgctcggtgaggtagcaatcgaagtcgcattgcagcgcacgcttgaggaacggcgtgaggctggtgccttcggtgatcgggtatttcggtgggatgatcaggccacgacggttgatcaggtccgaagtaaaggcgatgtcggccgctgaaaagcggaacgaggtgccgatcagcatggccatctgttcgttggtcaggtgctgcttggattgctggaagtcgtagagcagggcgtcgttgaggtcgatgtagcccttttgctggaagtagcgggtcagcttgttcagcaccagttcatagaaggtggtggtgttgttgatgcccttgacctcggtctgtaccagcttgtcgaggttggtgatcgaggtgtagaggttgaccggcgggttcagcagcaagactttcttgaagttgaagctgcgacgggtctcgtccagcttggccacgaatgccgcatccaggccgccgaggctgtagccggtgaggtagaagtcggtcaccggcagcgaggcgttctgtgcgcgcacggcctgcatcacgcggtacatgtcttcggcgtcttcctgggtgatccccggggtggcgaagcgtgaggcggcgctgatgaagtcgaagctggtgggcgacgacagttgcaccacgtggtagccggcctggtaatacagcttcttcaagtattcgttgatgctgctgtcgaatcgcgcgccggtgccggcgatcaggaatatcagcggcgcggcacggtcctgcttggcgatgcggtaggtgagtttcttcaccgcccagaagttgtccggcaggctgaactcgcgctcggggcgcatgttcagggtgtagtcggattggttgatctcgtcatcgctcggcaatttgggccgaaggtcgggcggtgtagtggcgatggtcgcttcaaacgggttggccaaagggtagccatagctggcttggtcaatgtcgacggccagtgctgacgcactcaaaaaaaggctgcccagcaaggcagcacagcgcaaggaacggagcatgacttaatccctaggaggaaacgtgcttaatgaagttcgcaggctatgaccaccgcgttgtcaccgaagtgccagcactcggcacgaaaagtcggaaaataacgtcggaatcggggtaatagtagccagacgatacactttgccacgcattggtgaacactaattgtgtgtatgcgccttgctaacggccaccggggcattaagctgggcgccgtttttgcctatcggagtggcccatgtcccgtcgtttaccgctgatttttctgctaattgccctgccgctatggctggctgccagttacggcgcgcgctttggctttatggaagatggccagtgggtcggcatctgcatcgatgaggccagccgctgggaatgccaattgcgttcgaacctgggcctgatgatccacttcaaggtgctcggttgggcagcgttgatcacgtcggtgctggcgttttttgtgccggggcgtgcagggtgggggttggcggtgctgggtatggtgttcgggttgccggcattggcgttgtacaacaccacgtttgcggtgtttgcggtggtgatcgcggggttgcggttggtcaggaaagggcgggcagcctgatagggcctcatcgggggcaagccccctcccacattggtaatgcactgacctgtgggagggggcttgccccgatagcggttttagaccttgcgcacccgcaagcagcgccacaaggctgccgtcatgagcaggctcactaccgcccaaccccaggcctgctggttcaacaacccttcacggtacaactgcggcgcaatacccgcaccgatgatgaaggccagcaacgcaatctcccgacgcggcccggttaccgggcgcaccaggtacaccagggctggcaacaccagcgcggcgctagggaaactgcggtagcgtgggtcaaacaccagtgccagcatcattactgcccctgcaaacccggcaatcgccaccagccagcctgcgcgttgctccagccagttgaaggcgcgtgcgcgccaatcttcccgtgagctgaggctcaaggcggcatgggtcagcaccagcaggttcaacaccaccagcaagcctgcccacacccattcatcgttgaagcgcgcggtgacgcgcgtcagctcggcccaggtgccgatggagcaggctgccacggcacccagcagtggcagggcgatggcggcccgcacactgcgcacgcgaccacccagcaccagagtgcccagcaggatgattccacctacacccagccatagcggccagtacggcacattggtcacgggcccggcgaggatgcccttgtcctggcgatcggcatcgaacaggccccagtaaccgcccacggcgccttcgcttgcgcgcttccatggctggtcaaaggcttcgatcaggttgtagcgccagccattggcttccgccatagccacgaaacctcgcatgaacttggcttcgttgacccggctcggtacggcggtttcgcgctggcggccttcgctgggccagccggtttcaccgatgaggatgtccttgggcgcgaatttgttgccgaaggtctggcgcacatcacctacgtgcttgagtgcctggtcgatgccagaagggtcatcttcccagtacggcagcaggtggatggtcaggaagtccacggccggcgcgatttccgggtgttgcagccagaactcccacacgtccgcgtaggtcaccggctgcttgatccggcttttgacggtctggatcagcgtcaccagctgtttggcggtgacttctttacgcagcagcgcttcgttgccgacgatcaccgaggtcactacatcagggttggcgttggctgcggcgatcaactcttcgatttctttctcggtcgccaccgggtcactactgacccaggcaccggccatcaccttcagtccatgcttgcgtgccatctccggcaaggcttccaggccggtcatggagtaggtgcgaatgcattcgaagcgcgtggccagcagggccaggtcggcatccatgcgttccgggcgcagtgtgaacggctggtcaaacggggattggtctttatcgaacggtgtgtaggaagcacattgcatcttgtgtgtggcactggcgacatcgggcagtaccacgggccggccgaggccataccagtaaccgatcagggccagcaggccgaggagcaaggcgcagaaatagggcagggcagggaagcgggcagtcgcaggcatggtcggcttatctgggggagcaaaggcgcgcatcttacccggatttgggccgtcccagtggggcagcataattttgacatgcaaagttcgggcgggattttggcgtcacgtcctacaaaatgccctgctggctatgtgatgtcgtttcttgcttgtatgaggtcgctgacagagcaggtcgaaggacgcggcaggttgatgatcgaagtgtcagcactccactgatgccgcagacaccggatcgatgcgcgtgacgggggcgcggtgcaccacataacaacaggttgacgtcgctcggcatccgtcgggcgcagcactttcggggaagtacgatgaagatgcgacgactcttgggcgcagctgccactctggtagttgcgatgagctccacactggccagcgccgacagcaaaaccctgagcatcggctatgtggacggctggtccgacagcgttgccaccacacacgtggcggcagaggtgatcaaggccaagctcggttatgacgtgaaactgcaagcggtagccaccgggatcatgtggcagggcgtggccactggcaagctcgacgccatgctgtccgcctggttgccggtgacccacggtgagtactgggccaagaacaaggacaaggtggtcgactacggccccaacttcaaggatgcgaagatcggcctgatcgtgccggagtacgtcaaggccaagtccatcgaagacctcaagaccgacaccaccttcaagaacaagatcgtcggtatcgacgccggctcaggcgtgatgctcaagactgacgaagccatcaagcagtacggcctcgactacaaactgcaagccagctcgggggcggcgatgatcgccgagttgacccgtgccgaagacaaacaggaatccatcgcggtcaccggttgggtgccacactggatgttcgccaagtggaaactgcgtttcctggacgacccaaaagggatttatggtgctgctgaaaccgtcaacagcatcggcagcaagggcctggagaagaaagcgccggaagtcgcggccttcctgaagaaattccagtgggcctccaaggacgaaatcggcgaagtcatgctggctatccaggaaggcgccaagcctgatgcagcggccaaggattgggttgccaagcaccctgagcgtgtagccgagtggaccggtaagtaatacggtaagcaaaacccctgtgggagggggcttgcccccgatgagggcgtgtcagttgaaatatcaatgactgatacaccgccatcggggggcaagtcccctcccgcattagtttcaccctctgcaaatcttcctgcattctcaaaacccctcgctacactcgatctaagactaaggtcgtctggaacctgttccgcagccgcatacagtggatacgttccaataataaaaaagctgtgctgcgaggataaaaacaatgaacgacagcatttacctctcgattcaaaacagcccgcgtttcaaggagctggtgagaaaaagggaaaggttcgcctggattctctcggcgatcatgctagggctttactccgctttcatcctgttgatcgcctacgggccacaagtacttggggccaagctcagccctggttcgtcgattacctggggcattcccttgggcgtcgggctgattgtgtccgccttcatcctgaccggcatctacgtgcgccgggccaatggcgagtttgacgacctgaacaatgcgattctcaaggaggctgcgcaatgatcggtcgtctactggcaatattcggcgcttcactctttgctccggccgtttgggcggcagacgcattgaccggtgaagtgcacaagcaacccctgaacatatcggccatcgtgatgtttatcgcgtttgtcggtgcgaccctgtgcatcacctactgggcttccaagcgcaacaaatcggcagctgactactatgcggccggcggcaagatcaccggtttccagaacggcctcgcaattgccggcgactacatgtcggcggcgtccttcctggggatttccgcactggtctacacctccggttatgacggcctgatctactcgatcgggttcctggtgggctggccgatcattctgttcctgatcgccgagcgcctgcgtaacctgggcaagtacacctttgccgacgtggcgtcctatcgcctgggccagacccagatccgcagcctctcggcctgtggctcgctggtggtggtggcgttctacctgatcgcgcagatggtgggcgcgggcaagctgatccagctgctgttcggcctggattaccacgtagcggtgatcctggtgggtatcctgatgtgcatgtacgtgctgttcggcggcatgctggcgaccacctgggtgcagatcatcaaggcggtgctgttgctgtccggtgcctcgttcatggcgctgatggtaatgaagcacgtcaacttcgactttaacgcgctgttctccgaggcgatcaaggttcaccctaaaggtgaagcgatcatgagccccggcggtctggtgaaagacccgatctcggcattctccctgggcctggcactgatgttcggtaccgccggcctgccgcacatcctgatgcgcttcttcaccgtgagcgacgccaaggaagcgcgcaagagcgtgctgtatgcaactggctttatcggctacttctacatcctgaccttcatcatcggtttcggcgcaatcctgttggtgagcaccaacccggcgttcaaggatgcggctggcgccttgcttggcggtaacaacatggcggcggtgcacctggccaacgcggtgggcggcagtatcttcctgggcttcatctcggcggtggccttcgccaccatcctcgcggtggttgcaggcctgaccctggccggtgcgtcagcggtgtcccatgacctgtacgccagtgtgatcaagaaaggcaaggccaacgacaaggatgagattcgcgtctcgaagatcaccaccatcgcgttgggcgtattggcaatcggcctgggtatcctgttcgaaagccagaacattgcgttcatggtcggcctggcgttctccattgctgccagctgtaacttcccggtgttgctgctttccatgtactggaaaaacctcaccacccgtggcgcgatgatcggcggctggctgggcctggtcagtgcggttggcctgatggtcctgggcccgaccatctgggtctcgatcctgcaccatgaaaaagcaatcttcccttacgaatacccggcgctgttctcgatgatcattgcgttcgtcggcatctggttcttctccatcaccgacaagtcggcggcggcagagaaagagcgtgcgctgtacttcccgcagtttgtgcgttcgcagactggcctgggggcgagtggggcggtgtctcactaaggtcgtagctggatagggaaatgccccggtcgaaaggccggggcatttttttgtctggggttctgcgttatgggtactcgcgtcatcgggggcaagccccctcccacatttgactgtattcacaaatagacatgtttgaaccgcgcccggtgtgggaggggggcttgcccccgattgcggtcgaccagttgtcacaaacaaaaacggcctccactaggggaggccgttttcggtgcaactaagcgatgcttacttgcgatcttccagcttggtgatgtcacgcgactcgtagccggtgtacagctggcgcgggcggccaatcttgtacgggctggagagcatttctttccagtgggagatccagcccacggtccgcgccagggcgaagatcacggtgaacatgctggttggaatgccgatcgccttgaggatgatccccgagtagaagtcgacgttcgggtacagcgagcgttcaatgaagtacgggtcggtcagggcgatctcttccaggcgcatggccagttcgagttgcggatcgttcttgatgcccagttccttcaacacttcgtcgcaggtctgcttcatcacggtggcacgcgggtcgcggttcttgtagacccggtgaccgaagcccatcaacttgaacggatcgttcttgtccttggccttggcgatgaatttgtcgatgttcgagacatcgccgatttcatcgagcatggtcaatacggcttcgttcgcaccgccgtgggcagggccccacagtgcggcgatgccggcggcgatacaggcaaacgggttggcacccgaagagccggccagacgtacggtcgaggtggaggcgttctgctcgtggtcggcatggaggatgaagatccggtccatggccttggcgagtgtcgggctgatcggtttgatctcgcacggcgtgttgaacatcatgtgcaggaagttttccgcgtacgtcaggtcgttgcgcgggtacatcatgggttggcccatggagtacttgtaaaccattgcggccagggtcggcatcttggcaaccaggcggatcgcggagatttcgcgatgctgcgggttattgatgtcgagggagtcgtgatagaaggccgacagggcgccgaccacgccgcacatgacggccatcgggtgggcgtcgcgacggaagccgttgaagaaggtcttcaactgctcgtgaaccatggtgtggttcttcacggtgctgacgaactgggctttctgctcggctgttggcagttcgccatttagcagcaggtagcaggtttccaggtagtccgacttctcggccagttgctcgatcgggtagccgcgatgcagcaaaatgccattatcgccatcgatataggtgatcttcgactcgcaagaggcggtcgacatgaagcctgggtcgaatgtgaaacggcccgtggccgtcaggccccgtacgtcgataacatcgggaccaacggtgccggttaaaatgggcagctcgacgggggctgcgccctcgatgatcaactgcgcttttttgtcagccatgtggcctcctatttatgcttcaaatcatcagacagaccccccacgcagggcccgcaccactatattgatataaatccagatgtcaatttgcctaaagtcttgcgccagaaggctttaaccgtactttttcctcgaaattgcctgccatttacgccttttattctcccagcgcaatccgctattagggtgaggagtgcgcgttgtcattagtaacctaactgtctatactcggccaccgaccgccaagggcttttgggcttgctttcattgggggtcgcactccctgggtggtgcttacctgaccagtgcactccccaacaactttgccctgattgttaggggctcttcagtgtgaaaaaaagccgtgaatagccaacgacctgtaaacctagacctaaggaccatcaaactccccatcaccggcgttacgtcgttcctgcaccgtgtttccggcatcatcctgttcctgggctcgggcatcatgctttatgcattgagcaaatccctgggttccgaggaaggatacgccgaggtgaaggcatgcttgaccagcccgctggccaagttcgtagcatggggcctcctgtcttctcttctgtatcacctggtagccggtgtgcgccacttgatcatggacatgggcatcggtgagacgctggaaggcggccgcctgggctcgaaaatcatcatcgccatttccgtggtgctgatcgttctggcaggagtttggatatggtaaccagcgttacgaatctgtcgcgttcgggcctctatgactggatggcacagcgtgtgtctgcggtcgttctcgcggcttatttcattttcctgatcggatacctcgtcgcaaatccgggcattggctatgagcaatggcacggcctgttttcccacaatgcgatgcgaatcttcagtctgctggcccttgttgccctgggcgcacacgcctgggtaggcatgtggaccatcgcgaccgactacctgacgccgatggcgctgggcaagtccgcgactgcagtacgtttcctcttccaggcagtctgcggcgtcgcgatgttcgcttacttcgtctggggtgtgcagattctttggggtatctgattcatggctaacattccaactatttcattcgacgccatcattattggtggcggcggtgctggcatgcgcgctgcgctgcagctggcccagggcggtcacaagactgccgtgatcaccaaggtgttcccgacccgttcccacaccgtatcggcccagggtggcatcacctgcgccatcgcctccgccgacccgaacgatgactggcgctggcacatgtacgataccgtcaagggttccgactacatcggtgaccaggacgctatcgaatacatgtgtcaggaaggcccggccgcggtgttcgagctggaccacatgggtctgccgttttcccgtaccgagcaaggccgtatctaccagcgtccattcggcggccagtcgaaggattacggtaaaggcgggcaggctgcccgtacctgcgctgcgtccgaccgtaccggtcacgcgctgctgcacaccctttatcagggcaacctgaaagccggtactacgttcctgaacgagtactacgcggttgatctggtcaagaacgcacaaggcgagttcgtcggtgtgatcgcgatctgcatcgaaaccggtgaaaccacctacatccgcgccaaggccaccgtgctggcgaccggcggtgcaggccgtatctacgcgtccaccaccaacgccctgatcaacaccggtgacggcgtcggcatggcactgcgtgcaggtgttccggtacaagacatcgagatgtggcagttccacccgactggtatcgccggcgccggtgtactggtgaccgaaggttgccgtggtgaaggtggttacctgatcaacaagcacggcgagcgtttcatggagcgttatgcgccgaacgcgaaagacctggctggtcgtgacgttgtggctcgttcgatggttaaagagatcatcgccggcaacggctgtggtccgaatggcgaccacgtactgctgaaactcgatcacctgggcgaagaagtactgcacagccgcctgccaggtatctgcgagctgtccaagacgtttgctcacgttgacccggtagttgccccggttccggtcgttccgacttgccactatatgatgggcggcgtgccgaccaacattcatggccaggcgatcacccagaacgctgaaggcgaggatgaaatcatccacggtctgttcgccgtaggcgaagtggcctgcgtatcggttcatggtgccaaccgcctgggcggcaactcgctgctcgacctggtggtcttcggtcgtgctgctggcctgcacctggaaaaagcgctgaccgacggcatcgaatacgatgacgctaccgacgccaacatcgaggctgcactggcccgtctgaacgcgctgaacgagcgcactgatggcgaagacgtggcaaccctgcgtcgcgagctgcaaagctgcatgcagaactacttcggtgtattccgtaccggcgaatacatgcagaagggtattgcccagctggccgatctgcgcaagcgtatcgccaacgtcaagatcaacgataagagccaggcgttcaacaccgctcgtatcgaagcccttgagctgcagaacctgctggaagtggccgaagcgactgcaatcgctgccgaggttcgtaaggaatcccgtggtgctcacgcccgtgaagactttgaagatcgcgacgacgaaaactggttgtgccacaccctgtacttcccgggtgacaagcgcgtgaccaagcgtgccgtgaacttctcgccgaagacggttccgacgtttgaaccgaagattcggacttactaagggtggctgccatgttgaaagtcagtgtttatcgctacaaccctgatcaggacgctgcgccgttcatgcaggaattcaaggtcgataccggtggtaaagacctgatggtgctggatgtactggcactgatcaaggagcaggacgaaggtttctcctatcgtcgctcttgccgtgaaggtgtgtgcggttccgacggcatgaacatcaacggcaaaaacggcctggcgtgcatcacgccgctgtccgccgtggtcaaaggcaacaagctgatcgttcgtcctctgccaggtttgccggttatccgtgacctggtcgtcgatatgagcatcttctacaagcaatacgagaaagttaagccgttcctgcagaacgacacgccggctccggccatcgagcgtctgcagtccccggaagagcgtgagaagctcgacggtctgtacgagtgcatcctgtgcgcttgctgctcgacgtcgtgcccgtccttctggtggaacccggacaagttcctgggtccagccgccctgctgcaagcgtaccgcttcctggcagacagccgtgacaccaagacgtccgagcgtctggcttcgctggatgacccgttcagcgtattccgctgccgcgggatcatgaactgcgtcaacgtatgtcccaaaggcctgaacccgactaaggccattggtcacatccgcaacatgctgctgcagagcggcgtgtaactgacgttgtagtaaaagcaggaccgttgtgcccgtaaatgctacggcgcaggcttcaaccggcgccgtagttttaacttgagcagcgacttacaaagccgcggctcttattttgaagaaatgagacaagcaggggcattcgggttggtacccgaactatcagcgtgatcctaagtggcttgttttggtcgctgcacttggccttttgcaagcaaactcggtgttttcgccggtggtgtccccaaatcgagggtgaccaagcatgcaagaaagcgtgatgcagcgcatgtggaacagcggctatctttcaggtggtaacgctgcctatgtggaagagctttatgagctctacctgcacgaccctaacgctgtgccagaagaatggcgcaccaaatttcagacgttgtcttcagacggcaacgctgccaccgatgtatcgcatgcaacaattcgcgatcagtttgtgctgctggcaaagaaccagcgccgcgcccaaccggtttccgccggtagcgtgagcagtgagcacgagaagaagcaagttgaagtattgcgactgatccaggcctaccggatgcgcggccaccaggcggcccagcttgacccgctggggctctggcagcgtcctgcacctgctgacttgtcgatcaatcattacggcttgaccaatgccgatcttgatacgaccttccgtgccggcgacctgttcatcggcaaagaggaagcgagcctacgcgaaattcacgaagcgttgcagcagacatattgccgcaccattggcgctgagttcacgcacatcaccgattccgagcaacgccactggttccagcatcgcctggaaggtgtgcgtggccgtccggtgctgtccgccgacgtacgcagccacctccttgagcgcgtaaccgctgccgaaggcctggaaaaatacctgggtaccaaatacccgggcaccaagcgtttcggcctggaaggcggcgaaagcctgatcccgatgctcgacgagctgatccagcgttccggttcctacggcaccaaggaaatcgtgatcggcatggcccaccgtggtcgcctgaacgtgttggtcaacaccttcggcaagaacccgcgtgagctgttcgacgagttcgaaggcaagaagaaggtcgagctgggttccggtgacgttaaataccaccagggcttctcgtccaacgtgatgaccaccggcggtgaagttcacctggccatggccttcaacccatcccacctggaaatcgtttctccagtggtcgagggttcggtgcgtgctcgccaggatcgtcgtaacgacaccacgggtgaaaaggtcctgccgatttccatccacggtgacgcggcattcgccggtcaaggcgtggtcctggaaaccttccagatgtcgcagacccgcggcttcaagaccggcggtaccgttcacatcgtcatcaacaaccaggttggcttcaccatcagcaacccgctggatgcgcgctccaccgagtacgccaccgacgttgccaagatgatccaggcaccgatcctccatgtgaatggtgatgatccggaagccgtgctgttcgtgacccaactggctgtcgactaccgcatgcagttcaagcgtgacgtggtgatcgacctggtctgctaccgccgtcgcggtcacaacgaagccgacgaaccaagcggcacccagccgttgatgtaccagcagatcaccaagcagcgcaccacccgtgagctgtatgccgaaagcctgaccaaggccggcgtggttgacgatgcacgtgttcaggcgaagatcgatgaataccgcaacgcgctggacaacggtctgcacgtagtgaaaagcctggtcaaagagccgaacaaagagctgttcgtcgactggcgtccatatctgggtcacacctggaccgcgcgtcacgacacctcgttcgatctgaaaaccctgcaggaactgtccgccaagctgctggaaatcccggaaggcttcgtcgtacagcgccaggttgcgaagatctacgaagaccgtcagaagatgcaagccggcggcctgccgatcaactggggttacgccgaaaccatggcgtacgcgaccctggcgttcgaaggtcacccgatccgcatgaccggccaggacatcggccgtggtacgttctcgcaccgtcatgcggttctgcacaaccagaaagacgctggcacctatgtgccgctcaagcacctgtacgaaggccagccacgcttcgacctgtacgactcgttcctgtccgaagaggccgtactggcgttcgaatacggttactcgaccaccacgccgaacgcgctggtgatctgggaagcccagttcggcgacttcgccaacggtgcccaagtggttatcgaccagttcatcaccagcggcgagcacaagtggggtcgcctgtgcggtctgaccatgctgttgccacacggttatgaaggccagggtcctgagcactcctcggcccgtctggagcgttacctgcaattgtgcgccgagcacaacatccaggtatgcgtgccgacgacccctgcccagatctaccacttgctgcgtcgccaggtgatccgcccgctgcgcaagccgctggtagtgctgacaccgaagtcgctgctgcgtcataaattggccatctcgaccctggaagatctggctgatggttcgttccagaccgttattccagaaatcgacacgctggacgcggccaaggtgactcgcctggtcctgtgcagcggcaaggtctactacgacctgctggaaaaacgtcgtgccgaaggccgcgaagacatcgccatcgtgcgtatcgagcagctttacccgttcccggaagacgacctgatggaggccattgcgccttacaccaacctcaccaacgtggtgtggtgccaggaagaaccgatgaaccagggcgcgtggtacagcagccagcatcacctgcgtcgcagcatcggcaaccacaacaaggccctgggcctggaatatgccggccgtgatgcttccgctgcacctgcgtgtggttatgcgtcgatgcacgccgagcagcaggaaaaactgctgcaagatgctttcactgtttaacgccttcgcgctgactgaaaccgaattttaaggacccacagataatggctatcgaaatcaaagccccgtcattcccggaatcggttgccgatggcaccgttgccacctggcacaagaaaccaggcgacgctgtaaagcgtgacgacctgatcgtcgacatcgaaaccgacaaagtcgtgctggaagtgttggccgaagctgacggcgtgctgggcgcaatcgttgccgaagaaggcgctaccgttctgtcgaaccaggtactgggctcgatcgaagagggcagtgctgctgccgctgcgcctgctgctgcgccggccgccgccgctgctgcgcctgctgccgctccggctggtggcgctgaagacccgatcgctgcaccggctgcccgccagctggctgaagagaacggcatcaacctggcctccatcaaaggcaccggcaaagacggccgtgtgaccaaggaagacgtggttgcggcggttgaagccaagaaaaacgctccggctgccgcacctgccaaggctgctgccccggctgctgctgcgcctgtgttcgccgccggcgaccgcaccgagaagcgcgttccgatgacccgcgtacgtgccaccgtggccaagcgtctggttgaagcccaatcgaacatggcgatgctgaccaccttcaacgaagtcgacatgaccgaagtcatggccctgcgttcgaagtacaaggatctgttcgagaagtcccataacggcgtgcgcctgggcttcatgtccttcttcgtgaaagcggccaccgaagcgctgaaacgcttcccggcagtcaacgcttccatcgacggcaacgacatcgtttaccatggctacgcagacgtcggcgttgccgtgtccagcgaccgtggcctggtggttcctgtactgcgtaacgccgagctgatgagcctggctgaaatcgaaggcggcatcgccactttcggcaagaaagcccgtgacggcaagctgaccatcgacgagatgaccggcggtaccttcaccatcaccaacggtggtaccttcggttcgatgatgtcgaccccgatcgtcaacccgccacaagccgcgatcctgggcatgcacaacatcatccagcgtcctatggccatcaacggccaggtcgtgatccgcccgatgatgtacctggcgctgtcttacgatcaccgcctgatcgatggtaaagaagccgtgactttcctggtgaccatcaagaacctgctggaagacccggctcgtctgttgctggatatctgattgaagcagctgcaagttgcgagctacaagctgtaagaaaaagcagcttggcttgcagcttgcggctaaaagcttgtcgcaaatagaggatctattttcatgacacagaaatttgacgtcgtagtgattggtgcaggtcctggcggctacgtagccgctatcaaggccgcacaactgggcctctcgactgcttgcatcgaaaaatacaccgacaaggaaggcaaactggcactgggcggtacttgcctgaacgtcggttgcattccttccaaggcgctgctggacagctcctggaaattccacgaagcccaggacggcttcgcgatccacggcatcaaccatgctggcgtgaccatggacgtaccggcgatggtcggtcgtaaagccaacatcgttaagggcctgacttccggcgttgccaccttgttcaaggccaacggcgttacttccctgcaaggccacggcaaactgctggccggcaagaaagttgaaatcaccaagccagacggttcgactgagatcatcgaagccgagaacgtgatcctggctccaggttcgcgtccaatcgacattccgcctgctccagtcgacaacaacgttatcgttgattcgaccggggccctggaattccaggctgtgcctaagcgcctgggcgtgatcggcgctggcgtgatcggcctggaactgggttcggtctggtcccgcctgggtgctgaagtgaccgtgctggaagccctggacacgttcctgctggctgccgacacggccgtttccaaggaagcgctgaaaaccctgaccaaacaaggtctggacatcaagctgggcgctcgcgtcaccggctcgaaagtcaacggcgaagaagttgtggtcaactacaccgacaaggatggcgaaaaaaccatcactttcgacaagctgatcgtagccgttggtcgccgtccagtgaccaccgacctgctggcatccgacagcggcgtgagcatcgacgagcgtggtttcatccatgttgacgatcactgcgcaacttccgtgcctggcgtgtacgccatcggcgacgtggttcgcggcatgatgctggcgcacaaggcttccgaagaaggcatcatggttgtcgagcgcatcaagggtcacaaaacccagatgaactacgacctgatcccatcggttatctacacccacccggaaattgcatgggtcggcaagaacgaacagcagttgaaagctgaaggcgttgaagttaacgtcggcaccttcccgtttgccgcttctggccgtgccatggcagccaacgacaccggtggttttgtcaaagtcatcgctgatgccaagactgaccgcgtattgggcgtccacgtgattggcccgagcgctgcagaactggttcagcaaggcgcgatcggtatggaattcggcaccagtgccgaggacctgggcatgatggtcttctcccatccgaccctgtccgaagcgttgcacgaagctgcgttggcagtgaatggcggcgccatccacatcgccaaccgcaagaagcgctaagcgagataataagaaaccacggcggagttgcccgtcgtgagccttgcgcgcaagactcaccgcggaatatccgctggacgcagccttgcgcagctttacgggccttgagccccgcaagttgcgcaagcagcagtcacaggtggcgcggcactcataatgagcgcagcgccgaatgcgcagtacctaacgaagacggtaaaaagcatgaatcttcacgagtatcagggtaagcagctgttcgctgaatacggcctgccagtttccaagggctacgcagtagacaccccggaagcagcagcagaagcttgcgacaaaatcggcggcagcgagtgggttgtcaaagcccaggtccacgccggtggtcgcggtaaagcgggcggcgttaagctggttcgcagcaaagaagacgccaaggccttcgcacagcagtggctgggcaagcgtctggtgacttaccagactgatgccaatggccagccagtcaccaagatcctggttgaatcgtgcactgatatcgctaaagagctgtacctgggcgctgtcgttgaccgttcgagccgtcgcatcgtgttcatggcttccaccgaaggtggcgtggacatcgagaagatcgctcacgaaaccccagaaaaaattctgaaagccactatcgacccactggttggcgctcagccattccagggtcgcgagctggctttccagctgggcctggaaggcaagcaagttgcccagttcgccaagatcttcgtgggtctggccaaactgttccaggatcacgatctggccctgctggaagtgaacccgctggtgatcaaggctgacggcgatctgcactgcctggacgccaagatcaacatcgacgccaacgccatgtaccgtcagcctaagctgaagactttccacgatccttcgcaagacgatccgcgcgaagcgcacgctgccaagttcgaactgaactacgtagccctggaaggcaacatcggctgcatggtcaacggtgccggcctggccatgggtaccatggacatcgtcaacctgcatggcggcaaaccagccaacttcctcgacgtgggcggtggtgctaccaaagaacgcgtaaccgaagcgttcaagatcatcctgtccgactccaacgtcgctgcagtactggtcaacatcttcggcggcatcgttcgttgcgacatgattgccgaaggcatcatcggtgcagtgaaagaagtcggcgttaaaatcccggttgttgttcgccttgaaggtaacaacgctgaactgggcgctaaagtactggcagaaagcggtttgaacatcatcgcggctaccagcctgaccgacgctgctcaacaagttgtcaaagctgcggagggcaaataatgagcgtcctgatcaacaaagacaccaaagttatctgccagggtattaccggttcgcaaggtagtttccacacccagcaagccatcgaatacggcaccaagatggttggcggcgtaactccgggcaaaggcggcaccgagcacttgggcctgccagtgttcaacaccgtgaaagacgctgtagctgccactggcgccaccgccagcgtgatctacgttccagctcctttctgcaaggactccatcctggaagcggcattcggcggcatcaagctgatcgtctgcatcaccgaaggcattcctaccctggacatgctggacgctaaagttaagtgcgacgagctgggcgtagtcctgatcggccctaactgcccaggcgtgatcactccaggcgaatgcaagatcggcatcatgccaggtcacattcacttgccaggtaaagtcggtatcgtttcccgttccggcaccctgacctacgaagcggtcaagcaaactactgacgccggtttcggtcagtcgacttgcgtcggcatcggcggtgacccgatcccaggctccaacttcatcgacatcctgaagctgttccaggaagacccgaagaccgaagcgatcgtgatgatcggtgagatcggcggttcggctgaagaagaagcggctgcctacatcaaggcacacgtgaccaagccggttgtttcctacatcgctggtgtgactgcccctgcgggcaagcgcatgggccatgctggcgcaatcatctctggcggcaaaggcactgcagacgagaaattcgctgcgctgcaagacgcaggcgttaaaaccgtgcgttcgctggcagacatcggcaaggccctggccgagctgaccggttgggctgtcaagtaagctctatgcttagttgacgccgtaccaacacaaaggccaccttcgggtggtctttgtgcgttccggggttaagtaaagatcaaaatgtgggagggggcttgcccccgattgcagtgggtccgtcaataaatacagtgactgacacgccgccatcgggggcaagccccctcccacatttgcctgtattgccaaattaggtatgaaaatgcgacatgcagatgtcgcttatcggacagtccgccccgcaacagtgcgttcgtcagccaatttctgtaccctagccgcctctttatgcgtgcgcatcccaaaaggaagccccgcgctagaccggtcggctcccataagggccggcagcatttccctcatccatagggaatccctctctaaattccgattcagtagtgtggtatttcctcaaatgaaagtgttgaaaagccaggacatcctggcgctgggctttatgacttttgccctgttcgtgggcgccggcaacatcatcttcccgcctatcgttggtttgcagtccgggcctcatgtctggatggcagcgttgggcttcctgatcaccgccgtgggtttgccggtggtcaccgtgatcgccctggccaaggtcggtggtggcatggacgcgttgagcagcccgatcggcaagatcgccggtggcctgctggcggcggcggcgtatctggcggtagggccgctgttcgctaccccgcgtaccgcgaccgtgtccttcgaagtgggcctggcgccgctgaccggcgagagcccgctggcgctgttcctctacagctcggtgtacttcctggtggtgttctttgtctccctgtacccaggtcggctgctggacaccgtgggtcgcttcctggcgccgctgaagatcatcgccctggccatcctcggcatcgccgcgtttgccttgccggccggtgacgtgggcgtcgctaccccggaatatgtggccgcaccgttttcccaaggctttatccagggttacctgaccatggataccctgggcgcgctggtgttcggcatcgtgatcgtcaacgcgattcgctcccgtggcgtcgagtcgccgaagctgatcacccgttacgccatcattgcgggcctgattgccggcgtgggcctggccctggtgtacttcagcctgttccgcctgggttcgggcagccatgccgtggctgccggtgccacaaacggtgctgcggtgctgcacgcctatgtgcaacacacctttggatccctgggcagcggcttcctggccgtgctgatttccctggcgtgcctggtgactgcggtgggcctgacctgtgcctgcgccgagtacttcagcaaaatcctgccgctgtcctacaagaccctggtggtgatcctggcgctgttctcgttgttcgtgtcgaacctgggcctgaccaagctgattgccttctcgatcccggtgctgaccgcgatctacccgccgtgcatcgtgctggtggcgctgagcttctgcaaagacttctggcaggagcagggccgcatcgttggtccggtgatgctggtgtcgttcatctttggctgcatcgatgcgctcaagggcgctggcttggcgggttggatgccttcgcccctggcgaacctgccgttgagcgaccagggcctggcctggctggtgccgtcggtgatgacgctggtcgtggcgttcggggttgatcggatgctcggcaagcgcagcgaagctatcgcataaacccatgtttcccgctgtactgaaatgccccgtatcaatcgatatggggctttttttatgggtgaacggcagtgtctttttctgtgcactaacgtcgaactgacgcaaaagcgtttcagccctctttctgcaaaggacccgcatgtcgttcatcgaaaccaatcagatccacctgcttgccgccctgtggttcgccctttgctggggcggctatacccgatacgccatttggaaggcccgtgacacggcctgcctcgccagcgtgctgcatctgtaccgcgaagactggatgcgccgcatgctgctgcgcgacaaccgcatcgccgacgccagtgtgatcggcaacctcgagcgcaacgcttcgttctttgcctccagcacgctgatcatcctcgccggcattctcacggtgttgggtgcttcagagcgggcagtgtcgttgctggcggacataccgatggtgcaacaggcgtcccaaggtatgtcggagatcaagctgctgtgcctggcactggtgttcgtctatgcgttctttacattcagttggtgcatgcgccagtacaacttcgcggcggtgctggtcggctcggcgccgatgatcggcgagcgggatgtgtcggagcaggagcgcaaggcatttgctctacgtgcggcgcgagtcatctccatggcggccaaccagttcaactttggcctgcgttcttattacttcggcatgaccatgctggcgtggtttgtcagcccctggctattcatgttgatgagcgctggggtagtgttggtgctgtatcggcgggagtttcattccgacgtgctgcaagtgatggtgtttacccagacggatacaccgccgtcggaaccggttaaagaagcggtttgatcaacccctcaagtaaaaaacgccaggcaaagtaaagcccgctatctaagcgggctttctttttgcagcgaagctacttcaaaccgcggtctcaagaaccggtagcaggtgctgcttcttttgcggcggcttggttcgattcagcctgagctttggcagcttcggcgttttctttcgcagcgtcgttcactttatcctgagccttggccatatctttctgagcttgctcagaatgggctgcagcgtcttgggctttgtcttcggatttcttgtcgcaggcagccagaccgagggcagcggccagcatcatggaaatagctaaagtcttgcgcatgggtgtttctccttattgaagatatctactggcctttcgagcatggcggttcggcattagttccttttattcggtagatatataaatcgctgactaacaggaacttttgccctggcgaccattctgcggatcaacactaataagagtctggaacgaatgagcgaaaatcccctgttagagcgtgcgaagcgctttgtatcggccttgcgccactgtcaggtgctgggcattaccgctcatcaggccagcgaggagggcatcacgctgatcatgccgtatgcgccccatctggtcggcgatccccaatcgggggtgattcacggtggcgcgctgacctccctgatggacaccgcctgcggcatggccaccctgtgcgtattgccggaattcgaggtgtgcccgaccctcgacctgcgcgtcgactacatgcatcctgccaccccacacaaaccggtgtacggcttcgcccaatgctaccgggtgaccaccgacgtgatcttcacccgaggcttcgcctaccaggatgacccgcagcaacccatcgcccatgtcgtcggtacattcatgcgcatgggcaaacgcctcaagggcgcacaaggactgggcagcacgatcaagggagagcaggcatgacgcaccgattcaagacccgcctggagcaggcccacgggcgcggcgattacgcagcgctgctcaacctgatcccctatgccaagttgatcggcatcgaatgcacccggctgggagatgagctgctgtttcgcctgccggccaacaaggacaatattggtaacccgatattgccggcgctgcacggcggggtgatcgcgggtttcatggaactgtcggcggcgctgcacctgctggtgttcaccggcgcaccgggcatcccgaaaatcatcgatttctccctggattacctgcgcgccggtcaatttcgcgacacttacgccaaatgccaggtatggcgccagggccggcgagtggcgaacgtggcgatcaccgcctggcagagcacggcggcagagcccatcgccacggcccgcgcgcattttaagatcgaggaaccaggccacccttgaaatcctgctcttagcccccaactttgatgacaacccgccgccaaccctctagggcgcggccactgccatccaattggagtttgatgaccatgagtgtggaaactcaaaaggaaaccctgggcttccagaccgaggtgaagcaactgctgcacctcatgatccattcgctgtattccaacaaggaaatcttccttcgcgaattgatctcgaacgcctctgacgctgtcgacaaattacgtttcgaagccctgtccaagcctgagttgctggaaggtggcgccgaactgaaaattcgtgtgagcttcgacaaggacgccaagaccgtcacgatcgaagacaacggtatcggcatgagccgtgacgatgcgatcgcccacctgggcaccatcgccaagtccggcaccgccgatttcatgaaaaacctctcgggcgaccagaagaaagattcgcacctgatcggtcaattcggcgtgggcttctattcggcctttatcgttgccgaccaggttgaagtgttcagccgccgtgccggcctcgacgccagcgaaggcgtgcactggtcttccaaaggcgagggcgaattcgagatcgccaccgtcgacaaggctgaccgtggcacccgtatcgtgctgcacctgaagtccggtgaagacgaattcgccgatggctggcgcctgcgcaatatcgtcaagaagtactccgaccacatcgccctgccgatcgaactgccgaaagaacaagcggcagccgaaggcgaagacgcgcctgcccaggaatgggaagtggtcaaccgcgccagcgcgctgtggacccgtccgcgtaccgagatcaaggacgaggaataccaggagttctacaagcacatcggtcatgactacgaaaacccactgagctggagccacaacaaggtcgaaggcaagctggaatacagctcgctgctctacgtgcctgcccgtgctccgttcgacctgtaccagcgtgaagcgccaaaaggcctgaaactctacgtacagcgcgtgttcgtgatggaccaggcggaatcgttcctgccgctgtacctgcgcttcatcaagggtgtggtcgactccaacgacctgtcgctgaacgtgtcgcgggaaatcctgcagaaagacccgatcatcgattccatgaagtcggcgctgaccaaacgcgtgctcgacatgctggaaaaactggcgaagaacgagcctgagcaatacaagggcttctggaaaaacttcggccaggtcatgaaagaaggcccggcggaagatttcgccaacaaggaaaaaatcgccggcctgctgcgttttgcctcgacgcatgaagagggtggcgagcaggtggtttctctggccgagtacctggcccgcgccaaggaaggtcaggacaagatctactacctcaccggcgaaacctacgcccaggtcaagaacagcccgcacctggaagtcttccgcaagaaaggcattgaagtgctgctgctgaccgaccgtatcgatgagtggctgatgagctacctcaacgagttcgacggcaaatccttcgtcgacgtggcccgtggtgacctggacctgggtaacctggactccgaagaagagaagaaagaagccgaagaagtcgccaagtccaaagaaggcctggtcgagcggatcaaggcttccctgggcgaggctgtcagcgaagtgcgcgtgtcgcaccgcctgaccgactccccggcgatcctggccattggcgagcaggacctgggcatgcagatgcgccagatcctcgaagccagcgggcagaaggttccggactccaagccgatcttcgagttcaacccggctcacccgctgatcgagaaactcgacggtgagcagagcgaagagcggtttggcgacctgtcgcacatcctcttcgaccaggcggccctggccgccggcgacagcctgaaagacccggccgcctatgtgcgccgcctgaacaagctgttggttgaactgtcggtttgaccctgacgtagaaaaacccgcttcggcgggttttttcgttctaacgcacctcaactggagtaaatgatgagccaagtcactgtacgttccgtggtctatcagattgatggccagtcctacgaaagccgcctggcgttcgatgccagccacaagggcccgttgccggggttgttgatggcgccgaactggatgggggtgagtgcgggtgccgaagagatcgccaaaagtgtggccggccagggctacgtggtactgatcgccgacctgtacgggcagaccgtacgcccgtcgaatggcgatgaagccggtgcggcgatgatgccgctgaagaatgacaacccgaagctgctcaaactcatgcaagcggcgtttgagcaactgcagggccaggccgaggtggatacctcgaagcttgcgaccttcggcttctgctttggcggcttctgctcgctggagctggcacgtaccggtgcaccattgaaggcggccgtctcgttccacggcaccattgacacccagaacccggacggcgccaagcatatcaagggttcagtattggtcctgcacggtgcttccgacccattggtgccgaaggcgcaactgccggcattcgaagatgaaatgaacgcggccggcgtggattggcaattgctgagctatggcggcgcggtgcattccttcactgacccccatgcgaatgtgccgggcaagatgatgtacgacgccaagaccgccaagcgcgcgttccagtcgatgcacaacttgctggatgaggtgttcaagggctgattcttcagcgcctgtccgggcctaatcgggggcaagccccctcccacacttggatgcaatcactgatcaaatgtgggagggggcttgccctcgatggctatctcactggcaactcaatcctttcagactcccccggcaccgtcggccactccccggccgcccacctctgcctggcctgctcgatcaccgcggggtcactcgcgacaaaattccaattgatccgccgtggcccatcaagcggcgcgccgccaaacaccaccaagtggcaatcactgtccgcaaacaatgtcatctcctgcccggccggcaataccactaggctgtggacttcaagcgcctcgccgtccaactgaccgtcaccttccagtacatacacggcccgttcctcatgctcatcaggcaacagtagggttgtagccgtctgcatccgcacctcggcatacaaggtgggcgacagcaccggcaccggtgacttgaggcagaacccgttgcccgcgatcaggcgtatctgcacgcccaggttgtcactcaccggcaggctcgccgccgggtgatggctgtaatgccccggccccgtctcgtggtctttgggtgacgccaaccatacttgcagcccatgcaggctgaacccgctggccttgagcgcctcgggtgtgcgttcgacgtgggcaatcgcgctgccggcggtcatccagctcacatcacccacctgcaccacctggtccgagcccaggctgtccttgtgctgcaatgcgccctcaaacagatacgtgagggtcgacagcccgatatgcgggtgttggcggatattcatgccgtgacccggcgcgtagcgggtcagcagcatatggtcgaaaaacacaaaaggcccgacgctgcggcattcccgcgacggcagcgggcgcaggatcggttggccttcgacgtcttcggggcgagggcggatcacggtgagggtggtcatggtgcgtcccagtctgagcgggttggatgctgctgagcataacccgctccacgggaggttgccgctattggctgaaggcgccttccgacagtttggtgtcgatgctgatctcggcggtggtcatcagcttgtgcaccgggcagcgatctgccacgcggtgcagctcatcgcgctgttcgtcggtgagcacgcccttgagggtgagcttgacgttgagtgtgtatttgcccttttgctcttcggcggcgtcatgggtgacctccacggtcacgccggtgagggggataccttttttctgggcgtagagcttgagggtcagggctttgcacgaggccagggcggcgtcgaagtagtcatggggggagggcgccgaatcgtcgccgccgaggctcttgggcaggtcggtgaacaactcatggttgtcgatgttgaggctgtggcgaaagttgtcctggttcagggtgtttacggtaacaggcatggcaaacctcacagggtggcaggatgaaggtcatgcagttatagagcatgctggcacttcgatgttccgcgttttttgccggatgaaccctggcaaggcgttcaaggtctacccgtatcagcccctatcgaggtgttaccgtgccctggactcgcctgacccttgccctgttgttcgcctccggcagccttgccgcgcaggcccgcgactatgcctacagcgatgcgcacctgcattacgtggatttcttccaggaaactgcaggcatggacaagctgctcaaggccatggccgacaatcgcatcgaacacgtgatgatttccggtattccggtcgcgaagaaatggcacgaggacgaacccaagcgcccgcgctattacgccggtgacgacgccgatgcctattggtacagcgccaccgacgtgatcgtggccgcagcggtcaacaaactgacccctgagcagcgcgagcattttcatccgttcctgtccggcttcaaccccaacgacaagaactcggacgcccatatccagcgcatgctcgatctcaacccaggcctgtggcagggcatcggcgaggtttttacccgtcatgacgacctcacggccatcaccgccggcgacacaccacgggccaataacgaagccatgacccgcatttatcacctggcggcggaaaatgacctgccggtgatgctgcactccaatatcacctccaagcgcgagcgcaacccgctgtacctggctgaagtcgaagagccactgcgcaaccacccacacacccgttttatctgggcccatggcggcaccagcaaggaaatccaccgtcaccaggtgcagatggactttttgctgcccaccttgagccgcatgctggaggcgtaccccaacctgtacatcgacctgtcctggagcatgcttacgccgtatttgctggatgatagaggccatcctcgtccggagtggataacgctggtggagcgtttcccggagcggttcatgctgggctcggacgtcgtcgggcgtttcaacaagctgggtaaggaaatgcgtcgcttcgagcctttcctcgatgcactgcctgaggacgttgcgcacaaagtggcacgcgacaatttcctggccatcctgcctaaagcccatcgcgatggggcgccacgctgatatcgcgttttgatcttacgcaaaccccagattgcgccgatacctttcaatagccagctgcaattggatgcagcgctggtgattgccagcgcatcggagcagtagacgtcgacaggcgcgaaccagagcagtgcggcgagccaggagttgtcgcggttggcggtggacctgaacacgatggtggcgcggttttcggtgtaggggcgggcgccgaggcggcgctatcgggggcaagccccctcccacctttgatttgtgagtgcattcaaaatgtgggagggggcttgcccccgatgaggccctcccagccactaaaaaatccagcccataaaaaagccccgaaccagtcggggctttttaatgcggtcaagctacaggtcttactgaccctgccagcgtttcagcaccagggtggcgttggtgccaccgaagccgaagctgttgctcatcacggtgtcgatttttgcattctcaacggtcttggtcaggatcggcatatcagccacaaccggatcaatctcatcgatgttggcggagccggccatgaagttgccttccatcatcagcaggcagtagatcgcttcgtgaacgccagcggcgcccagggagtgaccggacaggctcttggtagagctgatggccggggccttgtcgccgaataccgcacgcacgccttccatttccttggcatcgccgaccggagtcgaggtgccgtgggtgttcaggtagtcgattggggtgtccacggtggacatggccatctgcatgcaacggatggcgccttcaccgcttggggcaaccatgtcgtagccgtcggaggtcgcgccgtagccgacgatttccgcgtagatcttggcgccacgggccagagcgtgctccagctcctcgaccaccaccatgccgccaccgccggcaatgacgaaaccgtcacgcttggcgtcgtaggcgcgggaggccttttccggggtttcgttgtactgggtggacagtgcacccatggcgtcgaacaggaacgactggctccaatgctcttcttcaccgccgccggcgaacacgatgtcctgcttgcccagctggatctgctccacggcagtcccgatgcagtgagcactggtggcgcatgcggaggagatcgagtagttcacgcccttgatctggaacggcgtggccagacaggccgaaacggtgctgcccatggtccgtgtgacacggtacgggccaacgcgcttcacgcctttttcgcgcaggatgtccagcgcttccatctggttgagggtcgatgcgccgccggagccggcgatcaggccggtgcgtacgttcgatacctggtcttcgctcaggccggagtcggcgatcgcgtctttcatcgccaggtaggcgtaggcggcagcgtggccgacgaagcgatagatcttgcgatcgatcagttcttcgaggggcaggtcgatggagccggaaacctggctacgcagacccatttcggcatattccgggttgaagcggatgccagggcgacttgcacgcaggttagcggtgacggtctctttgtcattgcccaggcaagaaacaatgcccagaccagtgataacgacgcggcgcatgcggataacccttaaaagttgtcagtggaagtgaatacgccgacccgaaggccttcggcagtatagatctcgcgaccgtcgacgctcaccgaaccatcggcgatggccaggttcagcttgcccttgaggacgcgcttgatctgaatgttgtaggtgactttcttggcggtcggcaggacctggccaaagaacttcacttcgcccgaacccagggcgcgaccgcgacccggcaggccttgccagcccaggaagaaaccgaccagctgccacatggcgtcaaggcccaggcagcccggcatcacagggtcgccttcgaaatggcaggcgaagaaccacaggtccggggtgatatccagctcggcgaccaattcacctttgccgtacttgccaccctcttcgctgatatgggtgatgcgatccaccatcagcatgttcggggcgggcagttgcgcgttacctgggccgaacagctcaccgcgactgcagcgcagcaggtcttcccgagtaaaggcgttttgtttggtcatgcgagctcctcaataatcccatgcggcagggtagggcaaatcttcccgaaccgaatgaagcgttcatgcctcatgtcggcagcctacacgtagactattgcgttgtagtgaaagtcacagcggcaaggcactgaatgtacacttgttcactgaaattttaaaccgggcctgtttataggcccgttcgggtgcctaagactgccgcactttcgtctttcacgccagtcggagttggctgatggcgcggcgctattgcacccagcgctgcaggatttgctgcaaatccgtgcgtttgaacggcttggccaggtaatcgttcattccggctgccaggcaggcttcacggtcgccctgcaacgcgttggcagtcagggcgatgatcggcaggtcggcgcagccgggcagttggcggatcttgcgggtggcctcgtagccgtcgatcagcggcagccggcaatccatcaggatcgcggtgaaaatcaggctctcggcactgcggatcgcctcggcaccgtcggtggccaggctcacttcaaagccgaggctgcgcaacatggcttcgaccacggtgcggttgaccgggttgtcctctaccagcaatacatggcggccatcgccggcgttggctttgccgtcggcgccttgcgcgatggccggtacgctctgctggtcgatggccaggggaatttccagggtaaataccgagccgcggccttcttcactttgcgcgcgcagggtgccgcccatgcgttcggccagggtacgggcgatgggcaggcccaggccggtgccgccgtaacgccttgaaatggaactgtcggcttgctggaacgcatcgaacatcaactccaggcgttcggcggaaatcccgatgccgctgtcgcgcacggtgcaggtgaaccacaccagttcatggtcgagggtctgccaatggggttcgacgctgacgctgccctgctcggtgaacttcagcgcgttgccgatcaggttcaccaggatctggcggattcgcgtcggatcgccctgcacgcgcaaagcgtccaaccctggtggaatcgacagtttcaacgccaacccgcgctgctgggcgctgtgctggaacgcctgggcgcagctgttgatcaggtccgccaggttgaacggaatatgctccagctccagggccgcgcgttcgatgcgcgagaagtcgaggatgtcgttgatgaccttgagcaagtgctcggtggattcggaggccagcgccgcgtactcggtctgctcctcggtcatctcggtggtttccagcaattgcaacatgcccagcacgccgttcatgggcgtgcgcagttcatggctcatcatcgccaggaaatccgacttggcgttgttggcgcgctcggcctcttcgcgggtctggatcaactgggccatggcctgctgctgttcgcggctggcctggttgaggccttcggccaggttattgatgtgtcgcgacaggtcgcccaattccgagtcgtccacgatcggcaacggcgtcttgtagtcaccttgctggatggcttttacggcgtggcccatggcgctgatcggctgcgacaggctggcggccaggcgccgcgcgagcaggaaggtaaacagcagggcgaacagcgccaggatgccggccttgaacaggatctcctgctggcgctggctgaatgcgtcgttggacatgccgacgatcacccggcccaggtagtcggcccgcggtgctttgggttcgttgaggttgtcctggaaaaaatcattgcccaactggatgtgttgcaggcgaatcggtgcctggaacactttcaccgacagcgaacggtcgtgtttttccgacggttgctcgacatacaccaggatgttctcgctgctgtcctggatctccaggaaccgcacatggggcgtagcgagcgtggcgcgcagcaggctgtcgagcacttcgttgttgccggagatcaccccgtactcggtggcgggcgccagttggttggcgatcaactggccggtgtggtccagttcctggcgcaagtcctggatccgcacgaaggtgaaaaagctgatcaacagcaacgtcagcaacagcgccgggcccagggtgatgagctgggtgcgggtgttgatgtcccaacgacggcgcaaggtcatgggcgtttttctccttcggccaagcggatcgcgacgccggcttcgtccacctgttcgatccccagtgagcgcgcgacttgcgggttgcccacgactttgaagtgttccgggtacagcgagcgcggccagttggccggcgggtggtcgagcagacggtctagcacggccagccagtcggcctggtcgctgtaggtactggccaggctgccggcccgcacaaagcctgcattcgggcccaccagcggcaattgctgggcatagctgctcagcaacaggttcttcgcggttttcgggttgtacaactgcgggtcatcgaggccgagcagcacgtcactgttcctgaacaggttttgcagcgggcggctgtcattaatgttgtcccagagctgtggcacgatttccaggccgagcggtgtggcgtgttggcgcagttcgggcagcaggaactcactgtcggcgccatacagcacgccgatgcgccgcgcctggggcaggatggcggcgatcaggcgcagttggcgctccagcggtgggtcgctccacagtaggctgatgtgcgggtgaggtgtgctgcccaggcgttgatgggcctgtaaccgactgatacgcagcaccagggtcggcgggccctgggtttcctgcaggcgccagtcgaggccgggcaggtcgagcaggatcaggcgtgtgttggccggcagtcgaccaggggctggcaagtttttgagtggtgtgaaggtgacgcggtcttcggggcgttgctgggccagggcttgggcgaaggcctgcacgccgacgccgtcttcggcggcggtcaacaggatctcggcactccaggccggcgcggcaaacagcaggcacgcgagcagcagaatgcgtcgccagagcgtgtggataaaaaagcaggtcatccgtgacgagtcgcccatgtcagaactctagctccgcgctgaagtagagcacatggcgatggtcataattgttatcggcccaggtggtgggctggtgatcaaggcgttgttgcaacatgccggccagctccacgttggctttgcccagggcaatgcgcttggccacccgcaggtcgacccgttcgaagcgatattggttgagtgcgtcatcgccgtagtagaacaacgcgctggaccagccttggccccattcgcgcaaccaaccggcagagccactgttgcgcgcggtctgtgctttgtcccgcgggttgctgctggtggcatcgacgtaagcataggtcagccgcaggcggtcggcgttgctcacgcgccagtcgaactgggattcggcgccggtgaagcgtgcgctgttggcgttgctggcaatgtactggttattgcgcagcggcgaactgatcatgtcggtgatttcgtcgtagaacagtttcacgtccatgttcagcccgatgtcggcaaagaagccgttgtaccccaattcccgcgacttcatcatctctttatcgaggttgcccggcccccgcgtctttacgaagtattgcccggtggtctgaccgtaggccggggagctgaggttggtgacgcgataactccagttgacgttgttctcgaacatgtccggcgagcggatggcttcggagtacaccgcgcgcaagccatggcgcgggttgatcaggtagttgaccgccacccgtggcgtgagcgagttgccgctcaggtgcgtgtcctcatacatggcgccgccttgcagcagccaatgttcgctggcgcgccattccaactggccgaacaggcgccaggtggtgtcgtccagggtgccgttgaagtaggtgtcggagtcggcgcggtcgtagcggtaattcatgccgctgaccaggcgcaggctgtcggagaggctgagggtatcctggatttccagatcgtagcggctttcgcgggtgctctggtcgatgtctccgcacacgctctggttggcgccgttacgccattggtccagcacctggttggccagcgcttgctcggcggcgctgcccggtggcgcggtgccttggctgtaggtgtccatgtgccgggccagcagttcggcgtagttggggttcatctgccacagttgggtcaattccgggctgaacgacactttggcgtcgcaggccttccagatttggcggcggtcccactgctgggccgagccctggatgtacaggctgtgctcggggttgaaatcaaaattccagcgcagcgagccggcgtagtccttggccgtgacgtcggagttgttgccaccttcggtaatcccggcgaataccgggctgtaggtatacggacgttggttggtgccttccttcgcatccagttgccagtcgatgctctgctgcgcgttcaacgtctggctaactgccaggctgaagcggttgaggcgccgcccgtcgcggcggtcggcgccagcggcgtcgctgtcgaagccatcgtcctgctggccggacagcgacaggcgcaaatcgccggtttcccagccgacgccctggctggcatagaagtcgttgatgccacgttcgccacgcaccaccttgacccgcgtaccgtggctgttggcgggcgagcgcgtgaggatgttgaccaccgccatcaaggcattggcgccgtagctgacggtgttggggccgcggaacacttcgatgcgctcgatatcttccatggccaccggaatgtcgctccagtccacggtggccaggcccgcacggtacaccgagcggccgtcgatcagcacctgcatgcgccgcgcatcgctggcgctggtgccgtggtagttcaccgccgcctggttgccggaggtgtagccgaccatcatccccggcaccaggcgcagcaactcgctgatatcccgcgcgccgctggccttgatcagctcgctgtcgatcacggtcatgctgccgggcacggcggcggccgattgcttgaggcgtgtggcggtcaacacctggggcaatggctggctgtcgaggaacaggtcgtcggccatgacaggcgcactgcacagcagcatcaaccacagagatgaacggggaggagggcccaaatacacggcacggccttgataattacggatagccgcccatgttaactgaggtggggccatttgccagtcgcaggacttgcaattacttcatgtaagtgtggcattttccgacaagcgcacgaattgatacgggggctggccgccggcgggtcggcccgtataatgccgccatcgccactggtatggattaacggattgcatatgactgaacagcgccctatcgcggtcctgggaggcggaagttttggtaccgccgtggctaacctgctggccgagaatggtcacgctgtgcgccagtggatgcgcgatcccgaacaggccgaggccattcgggtgcaccgggaaaatccgcgttacctcaaaggcatcaagattcatccggcggtcgagccggtcactgacctgctggaaaccctcacggcctgcgacctgtgcttcgtcgcgctgccgtccagcgccttgcgctcggtgctggcgccccacgccgaacgcctggcgggcaagctgctggtcagcctgaccaagggcatcgaggcgcagaccttcaagctgatgagcgaaatcctcgaagagatcgccccccaggcgcgtattggcgtgctgtccgggccgaacctggcgcgggaagtggccgagcacgcactgaccgccaccgtagtcgccagtgaagacgaagaactctgcgaacgggtccaggccgtgttgcacggtcgtaccttccgggtctacgccagcagcgaccgctttggcgtcgagctgggcggtgcgctgaaaaacgtctacgcgatcatcgccggcatggccgtggcgctgggcatgggcgagaacaccaaaagcatgttgatcacccgcgccctggccgagatgacccgctttgcggtgaaccagggcgccaacccgatgaccttcctcgggctggcgggcgtgggcgacctgatcgtcacgtgctcctcgccgaaaagtcgcaactatcaagtcgggttcgccctgggccagggcctgagccttgaggatgcagtcacgcgcctgggcgaagtggccgagggcgtcaataccctcaaggtgctcaaggccaaggcccaggaagctggcgtgtacatgccgttggtcgccgggctgcacgcgatcctgtttgaagggcgcaccttgaaccaggtcatcgagttgctgatgcgcgccgagcccaagaccgatgtcgactttatttccaccagtggtttcaactgaggaacgcgtcatgaacgatccgaaagcagcccccaagtacgaatccattgccctgcgcatcctgtggatgctggtgtttgccctggtttggcaagtggcgcagttcctgctcggcgcgctggtggtggtgcaactgatctaccgcctggtctacggcgccccgaacctgggcctgatgaacttcggcgacagcctcagccagttcctggcgcagatcggccgtttcggcagcttccataccgagcaaaagccgtggccgtttgctgactggccgaccccgcttgcgcctgagggcgaagccgcccacagcgtgccgccggcaccgcacccggtgcgtgatgaagagccgaaactgtgaagttgtggatactgcgccacggcgaggccgaagggcatgcgcgcaccgatgccgaacgcaacctcaccgagcacggccgtggcgaagtgttgcgcagtgctgcgcacctgatcggccagcccctcagcgcgatcatcgccagcccttacgtacgggcgcagcagaccgcgcacctggtgcgtgatgcgttgggcttcgagccggagatccgcacggtgccgtggctgacccccgatggcaacccgttgaaggtgctggaaaaactcgacaccgacgacaatgtgctgctggtcagccatcagcctctggtcggcagcctgatcagcttcctgcagcacggccaccagcgccagccgcagccgatgtacaccgctagcctggcggaactagagggggatttcccgctggcggggctgatgagcctggtcagcgtgaagaatccgtaggctttatcgctgctttgtgtgtgctatatagtcaaccaagcaagtgcttggttggctatcgtcggaccacaaaggagcgcgtcccatgcccgtcgcatttcgattgccgttgcaggtgtttttcgaacgtgaagcgcggcacccgcgccagacctttctggtgcagcccattggcggcggcgaggtgcaacgcctcacttggggcgaagccggccatcaggcccgttgcgccgcgcactggctgcgcgcccgagagctgcccccaggctcgcacattgccctgatctcgaaaaactgcgcgcactggatcattgccgacctggcgatctggatggccgggcatgtctcggtgccgctgtatcccaacctcactgccgactccgtggcgcatgtgctcagccattccgaggcggcgctgacgtttatcggcaagctcgacgactggcccgccatggggcccggcgtgccgtccaatgtcccgaccatcagcttgccgctgtgcccaaccggcgcgttcgatttcagttgggccgacctgcagggctgttcgccgatccaggacgacccgctgccggccgctacggacctggccaccattatctatacctccggcaccaccggcctgcccaagggcgtgatgcacagcttcggcgcgctggggtttgccgccacccgtggcaccgagttgttcgggttgggggagggcgaccgcctgttgtcctacctgccgctgtgccatgtggccgagcgcatgtttgtggaaatggcggcgatctacaccgggcagacggtgtttttcgccgaaagcctggagacgtttctgaccgacctgcgcagggcgcggccgaccgcgctgtttggcgtaccgcgtatctggaccaaattccagatgggcgtctacgccaaaatctcggcaaaacgcctcgataccctgctgcgcctgcccttcatcggcaagcgcgtgggccgcaaggtgctcgccggcctgggcctggatgcgttgcgcatcgcgctgtccggggcggcgccggtgcccgaggcgctgctgcgctggtatcaacgcctgggcctggacgtgcttgaggtgtatggcatgaccgagagttgcggttactcccatgtgtgtcgccccggccagcagaccctcggctggatcggcctgccgtgccccggtgttgaggtgcgcatcgatcctgcgggcgaagtgcaagtgcgcagcggtgcgaccatgctcggctactacaaggacccgctgaaaaccgccgagacgatcaccgccgacggcttcctgcgcaccggtgacaagggcgagcaggctgccgacggccggctgcgcctgaccggacgcctcaaggagatcttcaagaccagcaaaggcaagtacgtggccccggcgccgattgagaaccgcctgtccgaacatgcgcgcatcgaacaggtgtgcgtggtgggcgatggcctgaccgcaccgatggggctgtgcgtgttgtcggcaatcagtgaggacccgcatgcgctgcgcagcagccttgaacgctggctggagcaggtcaatcaagcattggacaaacatgaacgcctgcgccagttagtggtggtgaaagacaactgggcggtggaaaacggcttcttgaccccgacgttcaagatcaaacgcaacgtgatcgaatcgacctacggtgaacatttccagacgtggagcgagcgttccgaaaccgttctgtggcaggattagggccatcataaaaccaacaaggacatccgcatgagcctgtggcgcacgcaaccgaacatcgaccaactcaatgcgatccagaaaaacaccattggtgaactgctggatatccgttttgaacgcttcgacgacgaatcgctgaccgccagcatggtggtcgaccatcgtacccaccagccctacggcttgttgcatggcggcgcatcggtggtcctcgccgagagcgtcggctccatggccgcctacctgtgtatcgatgcgagcaagttctattgcgtgggcctggagatcaatgccaaccacctgcgcggcgtgcgcagcgggcgggtgacggcagtggccagggcgatccatatcggccgcaccacccaggtgtgggacattcgcctgaccagcgacgacggcaaggccaattgcgtgtcgcgcctgaccatggcggtggtgccgctgggcgagaacccgccggcgcgataggcgtggcgtgagtgtcatcattcctggcagttacagtcattgctgtggcggtcggggctggtgacaatcaatctctgtttttgtcgatggatccggtatgtcgcagcatgtgtttttcgcccacgccaatggtttcccctcggccacctacggcaagctgtttgccgccctggccccggaatatgcagtggcgcacttgccgcagcacggccacgaccccaggtttccggtggacgataactggcagaacctggtggatgagctgatccaccacttggagcagcagccggaaccggtgtggggcgtggggcattccctcggtggcgtgttgcatctgcacgcggccatgcgttgcccgcagttgtatcgcggggtggtcatgctcgattcgccggtgctgacccgcgccgaccgctgggtgatccgcgcggccaagcgcttcggttttatcgatcgcctgaccccggccggccgtaccctgggccgtcgcgaggagttcagcgacctggaagcggcacgccgttacttcgccggcaagaccctgtttcgtggctttgatcccgaatgcttcgatgcctacctgcaacatggcctgcagcaagtgggcgatcgcctgcgcctgcgcttcgacccggccaccgaaatcagcatctaccggggcgtgcctcacaccagtcccggccaggtgcgccagatgaaggtgccgttggcggtggtgcgcggccgccagagccgggtggtgatgcgtcaccacgccagcggcgtcggtcgcctgcccctgggcgaaatgctcaccatgcccggcggccacatgttccctcttgaacgcccccaggacaccgcgaccttgatcaagagcctgttttcccgctgggaagcccgcgagcgcagttgcgcatgagcacaccggtcgaagaagtgcgcctgagcctgccgcatatcgaattggcggcccatctgttcgggcccgaggacggtttgccggtgatcgcgctgcatggctggctggacaacgccaacagctttgcgcggctggcgccgaaacttcaggggttgcgcatcgttgcactggacatggccgggcatgggcattcggcgcatcgtcctatcggcgccggttacgccttgtgggattacgtgtacgacgtgctgcaagtcgccgaacagctgggatggaaacgttttgcattacttggccactccctcggcgccatcgtttccctggtattggccggtgcgctgccggagcgcgtgacgcacctcggattgatcgacggggtgatcccgccgaccgccagcggtgaccacgccgccgagcggctgggcatggcgttgcaggcgcaattgaacctgcaggacaagcgcaagccggtctacaacaccctggatcgagcggttgaggcgcgcatgaaaggtgtggtggcggtcagtcgcgaagccgccgaactgctggcccagcgcggtctgatgccggtgccgggcggttacacctggcgcaccgacagccgcctgaccctggcttcgccgatgcgtctgaccgatgagcaggcgatggctttcgtgcggcgtgtgggctgtcctacacagttggtggtggccgcagacggcatgctggcgaaacattccgaattgctttcccagctaccctttaccgtcaccacgctgccgggaggtcatcatttacacctgaatgacgagcccggcgcggtccttgttgcagactgtttcaatcggttcttctgcgcgccttgacttggggcggtcaactgccgaggctgggcggattgaaagggagtcaaccatgaactacttcaacaccgctgtgacctccgatggccagggctcgttgatcttatgagcgtgcgtaacggatgtatccgtatcctgggcttgagccttctgagcccactggtatttgccgccgacgtaccgggtagccaggacctgcccaccgtggcccgccaggtcgacgcgcaaatcgtcgactaccgtcccgccgaagaaaaagaacgcatctaccccatgggcgccatccgcaagatcagcggccagttgcgttatgaaggccaggccaccgcgcggggccaagccactgccattacctatgagttacctgccgaacacagttccagtgccgcatttactgcgacgcgcgaagcgctgcaggcgaagggcgcgcagttgctgttctggtgccaggcccgggattgcggcgaaagcagcctgtgggctaatgaagtgttcggcaacgccaagttggtcggtgccgacggccagcaggaatacctgctgctgcgcctggcagccccccaggaaaactccctggtggcgctgtatggcatcacccgtggcaaccgccgcgcctatctgcatgtggagcaactggacgccaacgcgccgctggccgacctgctgcccacctccgcgacactgctgcgtgagttgaaaagcaccggcgagctggactttcccgcactgggcggcgagcctgacgacacctggttgaccctgatttcccgtgggttgaatctagataccaccttgcgcgtcagccttaccggcccgaacgccgaagcctggcgccaggccctggtcgacaaaggtgtgcgcgccgcgcgcctggaaaccggctccgctgaaaccaaaggcctgcacctgcatctgatacgctgaccgttacaaggcgaacggacccgcgccgttcgcctaagctctcttcctacagccttcttctagagatactccatgctcaataacgatcgcctactggtgcaaatcctgctgctggtgctgttcggtgccagtttctgggtgatggcgccgttctggtcggcgctgttctggggcgcggtactggcctttgccagttggccgttgatggtcctgctcacccgctggctgggtggtcgcgaatccctggccgccggcatcctgacgttgggttggatgctgctggtggcgctgcccctggtgtggctgggcttcaacctcgcggatcacgtgcgcgatgcgacggcgttgatcaaggatatccaggttgacggcctgccggaggcacctgcctggctcggctcgatccccttagtcggtgagcggctggtggccatgtgggacagcattgaccaacagggcgcggccttgatggtcagcatcaagccctacctggggcaggtcggcaattggttgttggcgcgcagtgcgcaaatcggtggtgggattctagaactgaccctgagcctggtcttcgtgttctttttctaccgggacgggccgcgcctggcgatgtttgttcaccgcctgctggagcgcttgatcggcgagcgtgccggctattacatcgaactggtggccggcaccgtgcagcgcgtggtcaacggcgtgatcggcaccgccgccgcccaggccctgttggcgctgatcggtttcctgatcgccggggtgccgggtgcgctggtgctgggcatcgtcaccttcctgctcagcctgattcccatggggccgccactggtgtggatcccggccacggcgtggctggcctggaagggcgattacacctacgcggtgttcctcggcgtgtggggcacgttcatcatcagtggcgtggacaacgtgctcaagccttacctgatcagccgcggcggcaacctgccgttggtcattgtgctgctcggggtgttcggcggcttgattgcctttggtttcatcggcctgtttatcggcccgaccctgctggcggtggcctacagcctgttgatggattggagtgcgacccaggcccaggggcggcgggaagacaagccgctctagacgcgtggcaaccacatcacggctgtcaaaccacccccgggggtttcttccaggtgcaaccgaccgccgaggcgttccgccgcttccttggaaatcgtcatgcccaggccgaccccgccggagttgcggttgcgtgagccttccaggcgatagaacggttcgaacaccgcctcgcgctggtcggcggcaatcccggggccatggtcgatcacccggatgaccagcgcttcgcggctgtccgccagttcgatgcgtgccgagccggcgtagcgcagggcgttgtcgatcaggttgttgaggcatgatcgcaacgccatcggttgcacttgcagcggtgcgcaggtcccgccgaactgcacatcggcgccctggtcctgggcgttttcgctcatggactcgaccagcgcctgcacgtccagccaatgccgggtttcgctggtgcgttgttcgtgcaggtagctcagggtagcgtcgagcatgccgatcatgtcgtccaggtcctggcgcatctggccttgcagccgggtgtcttcgatctgttccaggcgcagtttcaggcgtgacaacggggtgcgcaggtcatgggagacggccccgagcatgcgcgcgcgttggctgacttgctcgcggatgcgtcgctgcatcaggttaaaggtcgacgccgcttgctgtgcctcacgcgggccagattcatcgaggggcgggctgtcgaggtccaggctcaggcgctcggcggcttcactcaggcgctggatcggccggctcagcagcttggcgccgtaccaggctgcgatgatcaacgagatgaactggaacgtcagtggcaccaccgggccaccaaaccacggtcgcttgtgcctgggcaggtgtttcatcgtgccgtccggctgctcgacaaaggtctcttgaggcggcggtggaggtgggccgtaatagcgaaaccaggaaatggccagcacatgagccagcacaattgccaccagcaacacgccaaacagtcgaccgaacagcgtgttgaaggcgttgcgcatcagccgatgtcccgggcgtcgaacaggtagccttcaccccgcacggtcttgatcaattgaggggccttggggtcatccccgagtttttgccgcaggcgcgacaccagcaagtcgatgctgcgatcaaaggcttcgatggagcggccacgggcggcatccagcagttgttcgcggctcaacacccggcgcggacgttcgatgaacacccacagcaggcggaattccgcattggacagcggcaccaccaggccatcgtcggccaccaattggcgcagcacactgttgaggcgccagttgtcgaagcggatattggcgcgctgttcggtacggtcgtcacgcacacggcgcaggatggtctggatgcgtgctaccagctcacgaggctcgaacggcttggacatatagtcgtcggcgcccagttccaggccgatgatgcggtcggtgggttcgcagcgagcggtgagcatcaggatcgggatatccgattccgcacgcaaccagcggcacagcgacaggccgtcttcgcccggcagcatcaggtcgagcaccaccacgtcgaaggtttcggcctgcatggcctggcgcatcgccgtaccgtcggtcactccgctggcgagaatgccgaagcgggccaggtagtcgatcagcagttcacggatcggcacgtcgtcgtcaacgatcagcgcgcgggtgttccagcgtttgtcgtcggcgatcaccgcgcctttttgctcgtcgttcatagagacggaaggggtatgcatcatgcgatcatctgcctggttgttgcggtcagcataggcgcccagccccatggctggaagtgctggtcggtgggtcgtgcgagcgaggctagccgtggggcgtgttgggggcatgtcgtgaatgtatcagctttgaaataattacctgaaatgcccacccgatggcgcttggtcagtatttaccgatcatcggatcccgcaacgccgtcgcttgcgctacaatccgcgccgatttcgacttgcctgagagcccattccaatgtccgtctgccagactcctatcatcgtcgccctggattaccccactcgtgacgccgcactgaagctggctgaccagttggacccgaagctgtgccgggtcaaggtcggcaaggaactgttcaccagttgcgcggcggaaatcgtcggtacgctgcgtgacaaaggttttgaagtattcctcgacctgaaattccacgatattccgaacaccaccgcgatggcggtcaaggccgccgccgaaatgggcgtgtggatggtcaacgtgcactgctccggcggcctgcgcatgatgagtgcctgccgtgaagtgctggaacagcgcagcggccctaaacctctgctgattggtgtgaccgtgctcaccagcatggagcgcgaagacctggccggtatcggcctggacatcgagccccaggagcaggtactgcgcctggccgccctggcgcaaaaagccggcctggatggcctggtgtgttcggcgctggaagcccaggccctgaaaaccgcgcacccgtcgctgcaactggtgaccccaggcattcgtccggcgggcagtgcccaggatgaccagcgccgtatcctgaccccgcgccaggcgttggatgcaggttccgattacctggtgatcggtcgcccgatcagccaggcggccgatccggccaaggcattggcggcagtcgtcgctgagattgcctgacacttgaaagcgaacacagtaaaaaatgtgggagggggcttgcccccgatgacgattgctcagccaaaaatgtagtggctgacccaccgctatcgggggcaagccccctcccacattttgctctgcggtgtgtcagctgaccttgagcaccaacttcccgaagttctcaccgttgaacaacttcatcagcgtttccgggaacgtctccagcccctccacgatatcttccttgctcttgagcttgccctgggccatccagccggccatttcctgcccggcagcggcaaagcctgcggcgtgatccatcaccacaaacccttccatgcgcgcgcgattgaccagcaatgacaagtagttggccggacctttcacggcttccttgttgttgtactggctgatggcgccgcagatcactacgcgcgccttcaatgccaggcggctgagcacggcgtcgaggatatcgccgccgacgttatcgaaatacacatccacgcccttggggcactcgcgcttgagtgcggcaggcacgtcttcgcttttgtaatcgatagcggcatcgaagcccagttcatctaccaggaacttgcacttgtcggcgccgccggcaatgcccaccacacggcagcccttgagcttggcgatctgcccggcaatgctgcccacggcaccggccgcgccggagatcactacggtttcgccggccttcggcgctccggtgtccagcagcgcgaagtaggcggtcatgccggtcatgccgagggccgagagataacggggcaggggcgccagttttggatcgaccttgtagaaaccacgcggctcgcccaggaagtaatcctgcacgcccagggcgccgttgacgtagtccccgaccgcgaatttcgggttgttcgaggcaatcactttgcccacgcccagcgcgcgcatcacttcaccgatgccgactggcgggatataggacttgccttcattcatccagccgcgcatggccgggtcgagggacaggtattcattgcgcaccagcacctggccgtcctggggcgtgcccaccgggacttcctgataggtgaaggtgtcccgggtggccgcgccgaccgggcgcttggcgagcaggaattggcggttggtctgggcgatcatggcagcgactcttctggaaatgaacctgaagtgatagaccctgaacgggccgggagcaaggttcaccgagcgtgcgaatgccggtcgataggtgttgctgatagtcaggtggcgcctcttatcactgtgatgcatgcagcttcaaccggccttttgatagtgctgacgcgcctggcgctgcgttggctagactcgatccacgactttccctcacaggacatcctcatgagcatgacgttttccggccaggtcgccctggtgaccggcgctgccgccggtatcggccgcgctaccgcactcgcgttcgccgccgaagggttgaaggtggtggtcgctgacctggacgttgcgggcggcgaaggcaccgtcgcactgatccaccaggctggcggcgaagcgctgttcgtgcgctgcaacgtcacgctggaagcggatgtgcagcaattgatggcccagaccctcgccgcctatggccgcctggactacgccttcaataatgccgggatcgagatcgagaagggcaagctggcggatgggaccctggacgagtttgacgccatcatgggcgtcaacgtcaaaggcgtgtggttgtgcatgaagcatcaattgccactgctgttggcccggggcggtggggcgatcgtcaacaccgcgtcggtcgcggggctgggcgcggcgccgaagatgagcatttatgccgcgtccaagcatgcggtgatcggcctgaccaagtcggcggccattgagtatgcgaagaagaacattcgcgtcaatgcggtctgcccggccgtgatcgataccgatatgttccggcgtgcctatgaagccgacccgcgcaaggccgaatttgccgccgccatgcacccggtcgggcgcatcggcaaggtcgaggaaatcgccagcgcggtgctgtacctgtgcagcgatggtgcggcctttactaccggtcacgccttggcagtggacggtggcgcgacggctatctaggaccgcaggtcgccctccattcgaaaaggtcatggagggtgtgaggtttttccatagctggcacggtgccttgtcagaatgtgtatcagtaggtaaataacttaataaaatcaatactttaataagaattggcgagcggccgacgtgggcttccgtgcttaactgtctcgggttgaattacagacagttgaagtgagtggcgcatggatttagggatcgatcgacaagcccttgtaccggtggtgcagcaaatcatcagcgcggtggcgcaatggattcgcacgagtggggcgagccctggtacacgcttaccctccgttcgccaggtggctctcgataacctgctcagccagtccagtgtgatcgaggcattcgagcggttggtcgcccagggcctgctggtttcgaaacagggctcgggtttcagcgtggcccagccaccgaccgtgcacgaaagccagtggtacgaaggtgccgagcgggattggggcgccttcgcggataccccgttgggtgagctgaaactgggttgcggctggctgccggatgcctggcgcgaaagcgatgacatcagctacgcgattcgcgaagtcacccgctgcgacacggctgcgctgttcaactacagcaccccattggggctcccggcgttgcgcgagcaattgctcaagcgcctgacccaggcgcacatccccagccaccttgacggcatcctcaccacggcgggcgccagccatgcacaggacctgctgatacgcaccttactcaaggccggtgattgcgtggtggtcgaaacgccggggtacggcaacctttatcggcaactggcattccatggtgtgcaactgctgcaggtgccacgcacccgtggcgggccggacatcccggcgcttgaagccttgcttcagcgttatcggcccaagtgcctgttcatccacagcctgtatcacaaccccaccggttcaagcctgagtcgcaccgtggcggagcgtgtgttggagctggcgcaccgcgagaactttttgattatcgaggaggacgtgttcggtgatctgcaacacgccagttgcacgcgactctcggcgttaccccacggtgaccgggtgatctacgtcgcaagcttttccaagaccctgagcagcgccttgcgcgtgggctatctcagcgccagcacggcgatcatcgcgcaattggccagcctcaagactttgaccggcttcggcacttcgcggtttgccgaggccgtggtggcgacactgctggcaaatggcacctatcgcaagtgggtacagcgtctgcgcaagcggctgagtgcgcaaatggccgcgaccttgcaggtgctggaggatgaggagtgggaggtgttcgccaaccctgccggcgggatgttcgtgtgggcgcggccaggggtgggggatcggtcgcggttgcaggcgtgtgcccggcggctgggggttttgttgtcgccgggggcactgttcagtccaacggatgagcccagtgagtggctgcgaatcaatgtggcctatgctgctgatcaacgggcactggcgttattccgcgccatgggacctgccagatcgacctcgaccattctgaaaacgacgggcgtgtagctttttgccattattgtggcgccaacgacttgtgttcggtgccttgtggttgccaatctcgcttgtgtaaaccgggcttgatggcatctgccattgcaagaggatgcaagtgcaatgatttcggccgtgcaacgacgcttcgccaacctcggtatggcaaaaaaactgggcttgggcttcaccctggtattgctgctgaccgccctggtcgcggcgatcggcgtgtggtccctgcaaactgttggtcagcgcttcgaaggcctcaaggccatgtcgtcgctcaacagcggcttgctcagggtacgcctgatcgagcaggactacgcgttgcatgccgaccccaaggccgtcgacgccctgcatgaaagtgtcgatgccttggccgccctcgcggcgagcctcaaggcccagtcggcggccaacgtgccggtcatgaccgatgtcgaacaggccctggccgcctaccgcaaggcgttcgatgagtttgtcgagctgacccagaccaaggacttggcgttggaaatggcaagttggtcagtgtccagcgtggccaataacctcgatgtgttgcaggccgggctggctgacgacggtgcctatggcctcaaggaaagccagggcaaggagggcgccgagtttatcgagcaggcggggcaggtcagccaggtttcacggctgatgctgcaagccatgaacgaagcccacgtacgtctggaccagagccgcaaggtggacgctgatgacgccgagcaaggcaagatcgagcaggccgaccaggcgctggcccaggttgaaacactgaaaaccgcggtcaaggaccccggttaccagacggtgttgaatgaggtctccgggcatattgcttcgttcagtgaaaaactcggtgaatacaccggcctgctggcccaggagaaggtggtctacaagcagttgcgtgatcgcgccgagcaagtggtcagccgggtcaaccaggcttacgacaccgaagacctgtcgatgcaggcgcagcttaagaaaagcgcgatgctgatcatcggctcttcggccttggcgctgttggtggggttgattgcggcctgggtgattacccgcctgatcgtcgcgccgctgcgcagcgtgattgcggtcgcccagcagattgctgccggcgatttgagtgggcgcatggacgtcagtcgccgcgatgaaatcggccaactgatgcatgcgatgcagcagatgggcaatggtctgagccagatggtcagcggcctgcaggccggtatcgagcaactggccagctcggcgcattcgttgtccagtgtcaccgaacaaaccaatgtcgaagtcagtagccagaaagaagaaaccgaacaggttgccacggcgatgaatcagatgaccgctaccgtgcacgacgtggcgcgcaacgccgaagaagccgcgcaagccgcacagacggcggacgacaaagtcgacagtggccagcgggtggtgcgccagagtttgcagcgtattgaattgctggccacctccagcaccagtgccagcgccagcatcgagagcctgagcgccgagatccagaacatcggcactgtgttgagtgtgatcaaaagcgtggccgaacagaccaacctgctggccctcaacgccgccatcgaagccgcccgcgccggcgagcagggccgtggtttcgcggtggtagcggatgaggtacgggcgttggccaagcgcacccagcaatcgaccgaagaaatcgagcggctggtcagtaccttgcgcaacgcggcacagtcctcggtgcagcagatccagcaaagcggcgaactggtgaagctggcggtgagcgatgccctggaaaccgagagcgccctgggcagcatcgcggtggcggtgtcgctgatccagcagatgaaccagcagattgccgcggcggccgaggagcaaagctcggtggccgaggagatcaaccgtagcgttaccagtatccgcgccagtgccgatcagtcggcgctgagcatgcagggcaacgccgcatcgagcattcagctggcgcagttgggcgcggaactcaaagggatggtcgggcacttccgcctgtgatcgcagcgttcatgcggcgatcacaggggagggcggtcaggcgttgttggcgaggaaggtcagcagggcttcgttgacgaagtcggggttttccctggcgctgatatgcccggcttgcgggatcaggatcaggctgcagccgatcaggccggccatttcctcggactcggcaggcgggcgcggtttgtcctgttcgccgcacatcaccagcgtggtgtcggcgtccagcttcggcaactgctccagcacatcctcgcgactgaagatcaagcgacccaggggcacgatgctctgcagcaggcgctccttggagtagccctgcaattgctggcggaaatcctgatacagcgcggattcgcggtcgatacccgggcggaagaagatcggcgcgaccacgtccagcaacggctcagggatagcgccggcgtcttcgatcatcttgaatagcgagaagtaatactggcgcgtggcctcgggctcggcacccaggtaggtgtccatcagcaccaggctgttgatccgctcgggagccagcagcgccaaacgtgcgccccacataccgccgaccgagaggccgaccaggttgatctgtggaatatccaactggtccagcagggccagggcctggcgcgcgaggtcgtcgagggagtgggttggcgcgggcagcgggccggattcgccatggccccacagctcgggcacgatcacccggtactgttgcgacagggcttcgatctgcggcgcccacatgtcgcggtcccacaggtagctcgagcccagcaggacgacggggccggaaccctggtcgacgtagtgcagcggttgtccatcaatgacggcgacaggcataacgggcctctgacttcatggagtgaggggcacttttttacgctagtcgggggcggggggatagatgcaaagtgatggcatctcgggaagcggcgaggttgtttgtactgacctggcttttatgactgtggtgagcgggctcaccacaggccagtcttcaagccagcgaatcagtcgtagatgactttcttcttccactcggcgtcggcgtcgaccactttgaggccttcggtcagttcgttgacttcgtcttcagccggcttgctgttggtcagcaccgtggagttggcgcgtcccagctgggcttccaggtgttgcagctgggcgctgtagatcaccggctccggctgtttgcgcaggtactgcacgccgcgttcgaatgccagtcgcgcttggcccggctggccttgttgcagggcgtgctggccgaggttgttgaagaactcgatatgcagcaacaccaggatatggcggatctcgcggatccagtgcttggcctcgttggccggcaggaaaccgtcctgggccgcacgggtgacctggccgtgcagggcttcgagcaggaaacgcacatccttggccttggcttcggtctggatcggcgcgggcgggttgttcaccgggatcgattcgccctgggccaccagcgtattcaactcggtgatgcgggccttgagcggcgcgctgcctttgttcaggttcagcagccgttggttgacgttgagttccaggcgggtcagcaataacttgagtgccggggtcatcaattggccggggaaggtctcggtgatttcaccgcagcggcgcaggcgatcgttaagctcgatctcggtgcgcttcttttccagcttgttgttttccaccacgtggttcatgtagccaatggcgatcagtattgcgatcccggctattaccagcagggtgatcatgagtggtgtcaccggtgtgacctctttatagggtttacagtggagtgtagtgactgggccatccggcggataggactgatcgaccagctgcccgggtagtttgcttctatatggataggcgttccctgcatggatgcacattgccatcatttgccggaacgaactatagcgtcttgtcgggcgccataatataggcgtcaaagcccggacgtgcacaattgccccatgagctcgaaaagctgggggaagtcattgattttaataaatttatccttgggggttgacgatctttcaatccgtccatagaatgcgcgccacttaacgcgtaaagcacacagcaaaacgcggttaagcagtgaatgttgtacgtgtgtccccttcgtctagtggcctaggacaccgccctttcacggcggtaacaggggttcgagtcccctaggggacgccatttgcgggaatagctcagttggtagagcacgaccttgccaaggtcggggtcgcgagttcgagtctcgtttcccgctccaatttaagcagtgtggctctcgggcggcactgagtgaaaccagggcatgatcttcggatctaacccctggacactgaaatacacaccatgtgtttcagttgtgtgtccccttcgtctagtggcctaggacaccgccctttcacggcggtaacaggggttcgagtcccctaggggacgccatttgcgggaatagctcagttggtagagcacgaccttgcc

SEQ ID NO: 28 - DNA, 5092 bp, Pseudomonas nodulensis
cgcgagaaatcaaagatgtaaccaacgattgctgagccaagtttagggtttcttaaaaacccaaagatgtttgaactgaagagtttgatcatggctcagattgaacgctggcggcaggcctaacacatgcaagtcgagcggtagagagaagcttgcttctcttgagagcggcggacgggtgagtaatgcctaggaatctgcctggtagtgggggataacgttcggaaacgaacgctaataccgcatacgtcctacgggagaaagcaggggaccttcgggccttgcgctatcagatgagcctaggtcggattagctagttggtgaggtaatggctcaccaaggcgacgatccgtaactggtctgagaggatgatcagtcacactggaactgagacacggtccagactcctacgggaggcagcagtggggaatattggacaatgggcgaaagcctgatccagccatgccgcgtgtgtgaagaaggtcttcggattgtaaagcactttaagttgggaggaagggcagttacctaatacgtgattgttttgacgttaccgacagaataagcaccggctaactctgtgccagcagccgcggtaatacagagggtgcaagcgttaatcggaattactgggcgtaaagcgcgcgtaggtggtttgttaagttggatgtgaaatccccgggctcaacctgggaactgcattcaaaactgactgactagagtatggtagagggtggtggaatttcctgtgtagcggtgaaatgcgtagatataggaaggaacaccagtggcgaaggcgaccacctggactaatactgacactgaggtgcgaaagcgtggggagcaaacaggattagataccctggtagtccacgccgtaaacgatgtcaactagccgttggaagccttgagcttttagtggcgcagctaacgcattaagttgaccgcctggggagtacggccgcaaggttaaaactcaaatgaattgacgggggcccgcacaagcggtggagcatgtggtttaattcgaagcaacgcgaagaaccttaccaggccttgacatccaatgaactttctagagatagattggtgccttcgggaacattgagacaggtgctgcatggctgtcgtcagctcgtgtcgtgagatgttgggttaagtcccgtaacgagcgcaacccttgtccttagttaccagcacgtaatggtgggcactctaaggagactgccggtgacaaaccggaggaaggtggggatgacgtcaagtcatcatggcccttacggcctgggctacacacgtgctacaatggtcggtacagagggttgccaagccgcgaggtggagctaatcccataaaaccgatcgtagtccggatcgcagtctgcaactcgactgcgtgaagtcggaatcgctagtaatcgcgaatcagaatgtcgcggtgaatacgttcccgggccttgtacacaccgcccgtcacaccatgggagtgggttgcaccagaagtagctagtctaaccttcgggaggacggttaccacggtgtgattcatgactggggtgaagtcgtaacaaggtagccgtaggggaacctgcggctggatcacctccttaatcgacgacatcagctgctccataagttcccacacgaattgcttgattcattgaagaagacgataagaagcagcccgaaattgggtctgtagctcagttggttagagcgcacccctgataagggtgaggtcggcagttcgaatctgcccagacccaccaattttgtgtgggaaacgcctgtagaaatacggggccatagctcagctgggagagcgcctgccttgcacgcaggaggtcaacggttcgatcccgtttggctccaccactactgcttctgaaagttttgaaagcttagaaatgagcattccatcaaggtgatggtgaatgttgatttctagtctttgattagatcgttctttaaaaatttgggtatgtgatagaaagatagactgaacgttactttcactggtaacggatcaggctaaggtaaaatttgtgagttctcttagttgagaaattcgaattttcggcgaatgtcgtcttcacagtataaccagattgcttggggttatatggtcaagtgaagaagcgcatacggtggatgccttggcagtcagaggcgatgaaagacgtggtagcctgcgaaaagcttcggggagtcggcaaacagactttgatccggagatgtctgaatgggggaacccagccatcataagatggttatcttgtactgaatacataggtgcaagaggcgaaccaggggaactgaaacatctaagtaccctgaggaaaagaaatcaaccgagattcccttagtagtggcgagcgaacggggactagcccttaagtggctttgagattagcggaacgctctggaaagtgcggccatagtgggtgatagccctgtacgcgaaaatctcttagtcatgaaatcgagtaggacggagcacgagaaactttgtctgaatatggggggaccatcctccaaggctaaatactactgactgaccgatagtgaactagtaccgtgagggaaaggcgaaaagaaccccggagaggggagtgaaatagatcctgaaaccgtatgcgtacaagcagtgggagcagactttgttctgtgactgcgtaccttttgtataatgggtcagcgacttattttcagtggcgagcttaaccgaataggggaggcgtagcgaaagcgagtcttaatagggcgtctagtcgctgggaatagacccgaaaccgggcgatctatccatgggcaggttgaaggttgggtaacactaactggaggaccgaaccgactaccgttgaaaagttagcggatgacctgtggatcggagtgaaaggctaatcaagctcggagatagctggttctcctcgaaagctatttaggtagcgcctcatgtatcactgtagggggtagagcactgtttcggctagggggtcatcccgacttaccaaaccgatgcaaactccgaatacctacaagtgccgagcatgggagacacacggcgggtgctaacgtccgtcgtgaaaagggaaacaacccagaccgtcagctaaggtcccaaagttatggttaagtgggaaacgatgtgggaaggcttagacagctaggaggttggcttagaagcagccaccctttaaagaaagcgtaatagctcactagtcgagtcggcctgcgcggaagatgtaacggggctcaaaccatacaccgaagctacgggtatcacgtaagtgatgcggtagaggagcgttctgtaagcctgtgaaggtgagttgagaagcttgctggaggtatcagaagtgcgaatgctgacatgagtaacgacaatgggtgtgaaaaacacccacgccgaaagaccaaggtttcctgcgcaacgttaatcgacgcagggttagtcggtccctaaggcgaggctgaaaagcgtagtcgatggaaaacaggttaatattcctgtacttctggttattgcgatggagggacggagaaggctaggccagcttggcgttggttgtccaagtttaaggtggtaggctgagatcttaggtaaatccgggatcttaaggccgagagctgatgacgagttaccttttaggtaacgaagtggttgatgccatgcttccaagaaaagcttctaagcttcaggtaaccaggaaccgtaccccaaaccgacacaggtggttgggtagagaataccaaggcgcttgagagaactcgggtgaaggaactaggcaaaatggcaccgtaacttcgggagaaggtgcgccggtgagggtgaaggacttgctccgtaagctcatgccggtcgaagataccaggccgctgcgactgtttattaaaaacacagcactctgcaaacacgaaagtggacgtatagggtgtgacgcctgcccggtgccggaaggttaattgatggggttagctaacgcgaagctcttgatcgaagccccggtaaacggcggccgtaactataacggtcctaaggtagcgaaattccttgtcgggtaagttccgacctgcacgaatggcgtaacgatggcggcgctgtctccacccgagactcagtgaaattgaaatcgctgtgaagatgcagtgtatccgcggctagacggaaagaccccgtgaacctttactatagctttgcactggactttgaatttgcttgtgtaggataggtgggaggctttgaagcgtggacgccagttcgcgtggagccatccttgaaataccaccctggcaactttgaggttctaactcaggtccgttatccggatcgaggacagtgtatggtgggtagtttgactggggcggtctcctcctaaagagtaacggaggagtacgaaggtgcgctcagaccggtcggaaatcggtcgtagagtataaaggcaaaagcgcgcttgactgcgagacagacacgtcgagcaggtacgaaagtaggtcttagtgatccggtggttctgtatggaagggccatcgctcaacggataaaaggtactccggggataacaggctgataccgcccaagagttcatatcgacggcggtgtttggcacctcgatgtcggctcatcacatcctggggctgaagccggtcccaagggtatggctgttcgccatttaaagtggtacgcgagctgggtttagaacgtcgtgagacagttcggtccctatctgccgtggacgtttgagatttgagaggggctgctcctagtacgagaggaccggagtggacgaacctctggtgttccggttgtcacgccagtggcattgccgggtagctatgttcggaatagataaccgctgaaagcatctaagcgggaaactagcctcaagatgagatctcactggaaccttgagttccctgaagggccgtcgaagactacgacgttgataggttgggtgtgtaagcgctgtgaggcgttgagctaaccaatactaattgcccgtgaggcttgaccatataacacccaagcaatttgactactctaacgagcatcagattgcggtgtgtgaagacgaaatgaaccgaaagttcga

SEQ ID NO: 29 - DNA, 1558 bp, Pseudomonas nodulensis
cccccggtgtcagggtagttgtcgtgtcctccgctttttaaaagtattccgggggcggcaagagtaaggtcatgcctttctattcagaagaacgcaaagctgcgctgttgaaaatgatgcttccgcccctgagcctgtcagcgtcggaggtcgcgcgccgtgaaggttgtagcgacatgtctcttcattattggcgtaagcaagccgctgccagaggttctcagttgtccgaaaacaagcagtcgcctgaaagttggtctgccgaatccaagctcatggcagtcatcgaatcatcagctttgtcggagctggagctgagtgagtattgccgtcgcaacggtattttccctgagcaaattgacggctggcgcaaagctttcattgccaacagcactaatcactcagcgctgaaaaaaggaatcgctggtgagaccaaggaggataagaaccggattcgggagctggagcgtgagctgcgccgaaaggatgcagcgctggctgaaacagtcgcattgctggtgctgcgaaaaaagctcaatgcctactgggggaacgacgacgaggacaattgaccttgttgccagaacggcatcttctcgtcgagtggctcaccgaagccatcactgcgggcgcccgcagggcgcctgcgtgtctagaagtcggtatttcgctacgcacgctacaacgctggatcctgcccgaagcgttgttggcagatgggcgcaccacgacggtgaggccagtgccgaataatgctctgactgatgttgagcgccaagccatcctggccttgtgcaacagcaaggcctacgcacatctgccaccgagccagatcgtgccacggctcgctgacgagggacgttacatggcatcggaggcaaccttttaccgagtgctgcgtgcggcagatcagcagcatcatcgttcccgcgccaaacgcccgcatcgccatgaagcacccaccacctacgcggcgacagccgccaatcaggtgtggtcttgggatatcacgtacctgccgtcgccagttcgtgggaagttttactacctctatttgatcgaagatatctacagccgaaaggctgtgggctgggaagtttacgaagcagaaaacggtgaaaaagccgctgtcctactgcaacgaagtgtcactagagagaagtgctggcgtcagccgctggtgcttcactcggacaatggcgcaccgatgaaatcggtgacgttactgaccaagatgtacgacctgggtatcacgccatcgagaggaagaccccgggtaagcaacgataatccttactcggagtcgctgtttagaacgctgaagtactgcccgcagtggccgcaggatggatttggcagcctggatgacgcgcgtatctgggtcaggaattttatggcctggtacaacaccgagcatcgtcatagccgaatccgcttcgtgacacccgcccagcgccacgagggaaaagaccgggaaatcttggcccggagggcggcaatctatgggcaagcgagagaaaaaaggcctgaaaggtggtcaggcgagacacgcaactgg

SEQ ID NO: 30 - DNA, 1364 bp, Pseudomonas nodulensis
aaaaatctatggtcacccccatttttgcaatactgattaacgggtggtgtggttggcttgcttaaatctatccggcgtctgtttggggcttgccccagcgccacgatgagagtcgcgcctgacgatccttaaaaacccgtcggcttctgaagccgatttttatgtcaggatcttcgccaggccggtaggccgttcacgtcatccgttgttcagctatcgcaaaacctgaagggtgagtcgtggtactgcaacaaccgcagggtcaggcgttcaaggcgtctggccctgcttcatattgcgcatgatgagccgctatcgcccaagcgatacgcgccagtttgttggccagggcacaggccaccacattcgagtgtcgtcggcgcagcagcgctcgcacccagtcggccaaagcccctttctggtgatccagccgctgcatgtaaaccctggagcattgcaccaacagttgtcgcaggtgcttgtcacctcgcttgctgatccccaacaaattggctttgccgcccgtgctgtactgtcgcggcaccaagcccactgaagccgcaaaatcgcgactgcatcggtattgcttgccatcgcccatttctacagccagaaggctggcggtgatcgggccgacacacggcatgctaagcaaacgactccccagatcatcgtcggccagctggcaagccagttctttgtccagttccttgatccgttcatccaggtaaacgaagtgatcgtgcaggcgttgcaacagcactgtcagccgcgcaggcagctcatgctcggccaaaacagctgccaaacgcttcatgatggctaagcctttgggcaggctgatgccaaattccaacaggaaaccgtgcatctgattggctgtcttggtgcggtcatgcaccaacgactcgcgcatgcgatgcagaacagacagggtttgctgagactcggttttaggcgtgacgaagcgcatggacggacgagaagccgcctcgcaaatagcctctgcgtcgataaagtcgtttttgttgcccttgacgaaagggcggacaaactgcggtgaaatcaacttggtcgtatgccccatcgccgcaagctgacgggcgatgaagtgagagccggcacaggcttccgttaccacgacgcagctcggcaagttgccgaagaaccgcatcatctgcgctcgcgagagctttttgcgaaacacctcgcggcccgatttgtcttggccgagaaggtggaaattatgtttgccgagatcgatcccgatcagtgctgactcgctcatgatgatggcctccgaaaacaaaacaccctgtgaaagcgtagccctcacagggtgttgggggtgaccatctcattaa

SEQ ID NO: 31 - DNA, 948 bp, Pseudomonas nodulensis
ggaccggacacatggttgacgggtgtacggggacatggtggacacttttcggcggataaacttcgccgggaaatcatcatgccttgggacacgagagataccatgagcctgaaagaagagtttgtttccttagcacggcagcccggcagtaataaacgagagctgtgtcggcggttcggcattagccctcaaacggcctataagtggcttaaccgctacgagtcgcaaggccagtcagggctaaaggacaagtcccgaaaacctatttccagtcctaggctgaccccggcacgtctggagtcggaagttttagcgctcagacaagcacatccggcatggggtgggcgcacgatcagcagcctcttgaaacagcgaattgctcccagcactgtcactaatgttttgcaccgccatgggctgattcagcccgttccgaaggaacaggaggcaatgcacaggtttgagcatgatgcccctaatgatctttggcagatggatttcaaagggcattttgcaacacaagaaggccgatgccatcccctgaccttgctagacgatcactcacgattcaatttggctattcaagcttgtgaaaacgagcgtggagcgacggtcaaggaaaagatcgtcgaggtatttcagcgtttcggtttaccggcccgtatcaatgttgataacggcccaccgtggggctcaccacgtaatccaggggaaattacagagctgagtatctggctgattcgcttaggaattcggatcagcttcagccgtccttaccatcctcaaactaatgggaagatcgagcgattccatcgctcgctcaaagccgaagtgctcgatggccgtcaattttccacattcaaggaagcccaaatagcatttgatcgatggcgtgaggtgtacaacttgcagcgccctcatcaagcgttggattacaaggtacctatg

SEQ ID NO: 32 - DNA, 47536 bp, Pseudomonas nodulensis
  misc_feature (16508)..(16534): n is a, c, g, or t
gccgccgatcatttccgatgatcggcggcgttttttattgggtaatcagaaatcccagcgggtgctgaccatgaagttgcctgcgccaggtcggcggcattctggcggtagcccagtttgcgtcgcagcttggtgagcagccagccatgatgctcgctgtagagctgggtaatttcccgttggaatggcggttcacccacagacataggcgtggctcaggcgttattgagaatagtttttaattgtgcggtctagccgccggtaaacgcaatagactcgcgtttgaggacacagaagcccgtttttgctgggttttgtcattggcgagaaaatatttcaaataaagtgcatttaaatcaagacattgcggatttttggtgtatgatgccgcccacaccgaaagtgaagggtgattagctcagctgggagagcgtctgccttacaagcagaatgtcggcggttcgatcccgtcatcacccaccattcgcttcaagtgttatgcgcagcggtagttcagtcggttagaataccggcctgtcacgccgggggtcgcgggttcgagtcccgtccgctgcgccatattcggtcacctggaacgctgaacgccaggtcgccctaagaagcccgctcattgagcgggctttttttcgtccgcgatttgacctcccttgccttgacgttgtgcactgcctcttcgccctgaactgtgctggtgcgtcatgacgtgagggaatacccccatgcacattggtcgattgcaccccttgccgcttaaacgtttatctatagccacgcgaagacttccaggcgagtcatcggcagcaggacgctgcggtgcccgctctccaacacaaaaaatagtctgcaaggggaatggctctagatgaaatatccactgcgtccgttggtgttctggccaactttcctgatcctgctggcggcggtgatcgccagctacgttgacctgaatgcgttcctggcgatcagcaaacagctcaacaacctgatcctgaaaaacttttcctggctgttcagcgccggctcgtttgccatggtcgtgctgaccgccatcgtctacttctccgcgctgggcaaggtgcgtatcggcggtgaagacgcgcaaccgttgctgagtaaatggcgctggttcatggtggcactgtgcaccaccctcgcggtaggcgtgctgttctggaccaccgccgaaccgctctaccacctgtacggcccgcccaccagcttgccaatcgaggccggcagcgcggcggcgaagagcttcgccatgtcgacgatgttcctgcactggaccatcaccccctacgcgatctacctggtgccctcgctggtgtttgccctggtgttctacaaccgccgcagcaatttttccatcggcgccatgcttgaaccgttgctcggcgaagcacgggtccggcgctatgccgggctgatcgacaccctggcgatgttcgccctggtcgctggtatggcctcgtccctgggcaccggcgcgctgaccctggctggtggcctggcccagtacatcggcggtgaaaccacgccgttccgcctggccatcatcattgcaatcatcgtcatcacctttgtcgcctcggccgccagtggcctgcaaaaaggcattgtgatgctgtcttcgttcaatacctggatcatgctggccctggggctgttcgtgctgttgtgcgggccgaccttgtacatgttcagcctcggcgtcgaatccctcggcatctacctcgacaccttcttcagccgcagcctgttcaccggcgctgccagtggcgacacctggccgcacagttggacggtgttctactggtcggtgtggtttgcctgggcgccggtgagtgcgctgttcctcggcaagatcggccggggctataccgtgcgcgaattcatccacatcaacatgctctacccggcgttgttcacggccgtgtggatctgcattttctccggcaccagcctgtatttcgatgcgctgggcgacggcagcctcaaccgtgtgctcaacgagcagggcgtggagcacgtgctgtaccagatgttccagcaattgccggccagcggcctgatgatcgcgttcctgctgttcgtggcgttcatctcctttgtcaccgcggcagactccagcaccgacgtgatcgccaacctgtgcagcaagggcgtgactgccgattccgatctcgacggcaacccgctgttgaagattgtctggggcctgatcatcggcacggtgtcgtgggtgatggtcgcgtttgtcggcgtggacggggtgaagatgctctctaacctcggcggtttgccgggcatgatcctggtgttgctggccagtacctcactgatcttctggttgaaaaaccccgcattgctggatgtgaaacgccttcagcggacacctgagacggaactgcgtggcgccagcccgctgccggatttcgcccgctgatcgattgaaccgctgttggagttactgatggaaatcgtcactgagtttacttacaccgtgcgcgagatcgagcactgcctgatccctttgaaggacggcacccaactggccgcccgcatctggctgccgcaagtcgccgacccgcagaccttcccggcgatcctggaatacctgccgtaccgcaagcgcgatggcaccgccgtgcgtgatgcgctgacccacccgtggatggcggggcaaggctatgtgtgcgtgcgcgtcgacatgcgtggcaatggtgaatcccagggcctgatggccgatgaatacctgttgcaggaacaggaggacgccctcgaagtgatcgactggctgtgccggcagccatggtgcgacggcaatgtcggcatgatgggcatctcctggggaggcttcaacggcctgcaagtcgcggcacgccagcccgaggcgctgaaagcgatcatcacgctgtgttccaccgatgaccgctttgccgatgacatccactacaagggcggcaacctgctgatggagaactttggttgggccgccaccatgctcaacttcagcgcggcggtgcctgaccctttgctggtcggcgatgactggaaagatctctggcaacaacgcctggacgccatgccgttgctcgccgaaacctggctgcagcaccagacccgcgatgactactggcgccatggctcggtgtgcgaggactatgcgcagatcaaggccgccgtgtatgcggtcggcggttggggcgacgcctaccgcaataccgtctcgcgcttgatggaaaacctgccagggccgaagaaggccatgatcggcccgtggattcacaaatacccgcacttcgccgtgcccaatccagccatcggctttctgcaggaggccaagcgttggtgggatcactggctcaaaggtgtggataacggcgtgatggatgacgcggcgtgcaccttttacctacaggatattctgcccccgaggggcagttatgccgaacggccgggcatctgggtacagaccgccggctggccggacccacaggtgcaatggactgatttcagcctgggcgaacatggcctgactcctggggcacagcccttggtcacaccgcgtagcatttgctcgccgctgaccacgggcctgcaccagggcgaatactgcgccatctggtttggccccgatggcccgacggatcagcgccgcgatgatgcccactcgctgtgcttcgattcccaagcgctgaccgagccgttggcgttgttgggcgatgcccgtctcacgctgcgcctggcgagtgacacggcctgcggccaattggtcgccaggctgaatgccgtggcaccggacgggcaggtgacgcagatcagttatggcgtgctcaatctcacgctgcgtgaagacttctcttgcgtaacacctgtagtcccgggggaaccgatggaggtacatctaaacctcgaccacatcggcctgcgcttgccggccggttaccgcctgcgtctggccctgagcaccgccagtttcccgttgctgtggccaagccgcgagctgacaaccctgaccttgctggcgaccctgcaaagcctgcaattgccggtgttcaccggcgctgcggtggactgcccgttcgaggcgccgcaatcggcgacgccagtggcgatggaagtcctacgcgccgctgcgccgaaacgcaccctgatcgaagatgtgggcagtggcgaagtctgcgtgaagatcgaagacgacctgggtgcggtgcgttttaccgatcacggcttgtcggtcgaccagcgttgcaccgagcaataccgcaccttgccttgggacccgctgtcgacgcgggcggatatcgaatggcactaccgcgtcggccgtgaccagtgggccgtggaggtggacagccacttgagcgtgcatgccgatgccgagtggttctacatcgaagcggagcagacagcctgggaaaacggccagttggaacatcgtcggcaatggagcaagcgcgtggcgagggtcgcgctgtaagcaggcaactggcaggatgcttgccatcgtgatcgctgcgggcctggggcaacccgggctcgtcattgccaatggaactgctcatgtcgcgtcgaaacgtcgatcttccaccgctcaactgcttgcagacgttcgaagcggctgcccgccatttgagctttacccaggcggctaatgaactgaacctgacccagagcgcggtcagccgtcaggtcaagcgcctcgaagaggacttggcccgcccattgttttatcgcctggcccagggcctgagcctgacgcccgccggtgtgcgttacttccgcaccatccagcgcctgctgcgcgagttggaccgcgagtccgccgagttgcgccggcgtggcgccgaccgccagttgaccctggccagcacgcccactatcagcacgatctggctcgccggcctgttgccacaattccagcgcgaacacccggacctggatatccgcatcctgtgcagcgaaagccccagccatctggacgtcagtgaatatgacctgggcctgttctatcacctggatgaactggccgcgccccacggcctcgagctctcgccggtgttcgacagcgagcaggtcatcaccgtgtgcagcccggcctacctcgaacaccacggcccgattcgcgatatacaccatttgctgcacgctcacaccttgctgatcgtggaggatcactaccacgattggctgacctgggccgactggttcaccgacgccggtgccgactattacaccccgcgccacgcgttgcggaccaacagctatcaactgctgatgcagtcggcggtgatggggcacggcatcgcactgggctggaagagtctgttggaggacgacctggcttccgggcgcctgcaaatggccttgccccataccatgcacagccgcggccgcctgcatctgatgcaaccccaccaccgcaacccaccgtcggccgcgcgcagttttcgccaatggttactggccaagaccgccgcggcggagtcagctggctgaaggtcaacgctggccggtttttttctttcggttctgccgcgtcgccaagtgctcgaaacaaaaagacgcggtgccgaacaccgcaatcagggtgagtacgagcatgccgagggttgagctttccacggtgttttcctacgggtgatggagtaggtcttcacggtagaggcggggagagagtggctcaatagacccgacgcaatccttacgccgccgggtccattgttacgcactttttacggggcgttgcggctgtggcggtaatcgctgaccgcttcatacaccgccttgcgcaagcggttgatgccgccgacagggcgatgttccgctacgccgaaccaggggttgaacgactggttgtcgcacgccaggttctgctcgggggtatcgaagtcctgcgccgggatacgcaccttggccacggtttcgtagggcgcatcgctttccttccactcgatgctggtgtcttcgatcggcatgaatttctgcgggttctgccgctggatctgcagcacgaaacacgcaggcacgcgatcggtggacaactgctggctcaaggcgctgcgcagaaaattcggcaggtcctggttctgtttgggcagtgcatactccgggcaactctgcgggtctggggccacgcggaacttggcgttggccgtgccgaacttgtagggcgagaccgaaaagtaggtggtctgtgtcggactcgccggtgccggcgccagggtcgccagggcgatgaacaagtgacgcacctgccaggtgcgcgggtcgaccttggggaagaacgccaggactttcttgccatccgcctgggcgccgatgttctgtgcgtactccgccacatcactgacaaagaagttcgggtggctgaacatcacgaagtcctgttcggtgcgggtctgctggtcggccagcagttgcttgcccggcacgtccaacagcttgagggccatgccccgtgcatcgcggatgctgtcgaactgcgggtacgcgttgccgttggacagccgcatcagcgcctgccaggtcttgcccggctcggcgaacacgccctggcgcagcgccggatcgaggtcggccattacgctgacttcggccttcacgcagccgtgggccttggcgtgggcgtcgcgcaggtaacgcgtgccttcgcggtgttggtcgacgatgcgcaccgccgtctggatgattccttgggtcatcgccgcttcgccgggcggaatctgttcgtttggcgacaccggcccgctgtgctgccaggcataccaggcggtggcacccagccagccgagcaggccgaggcccaccagccaaagcaaggtcttgcccagaaacgcaccgatgcgcagccacaggcgggcgagcagggaaggtcggtcgtagggggatcgaatcatcatggcagttgttgctccagcgggccgcccagcactttgaggtattccagcagcgcccagcgttcctgcggtagcaggccacggccgatcacgcccttgccacgactgccggcacggaattcatggccgctgttgtggttgccggtgattttggtatcgaacaggaacgcattcttgaacgccgccgtctcgaaaccgagatgacgcgggtcgtagttaaaggtgcctttatagaaggtggtgctgcgctcatcctggggcgagagtaactgatagatcgtcggcaccgagccgttgtgcaggaacggcggcgtagcccacacgccggcgagcggccgtgccttgtaggcgcgcagctcgcgcacgccgatgggcaagccgtatccatccaggcgcggacgctcggccggggtcacgccggcggcacggtaggcgtgctcttcgacaaaggcggtgacgtaggcgaggcccttggccacggacatttttttcaggtccagcggttcggtcggcgtcgggtgcagctcgacgttgagtttggccagttccgccgggtcccattgcagggcgctgaggtcgtagcgctggtcggcaatgttgctggcggtgccagggtcagtgccgatgtagtccaccggcagcattttgagcgcctgcaccgggcggccgttttcctgggtgacactgggcacatggcagccggcgcagttttcggtgaacagtgcacggccctgggcggcgaggggcttgtcgatggcgccgaacaggtcctcgggccaggtcggcggcttgaggcgttgcagggtttcttcgatcaggttgaggtcacgcacgcggacgctggacgggtaacgcgcatcgccctggagcggctggccggcggcatcgaaaaagctcagcgtggcgccgacacccagggcctcaccgatattgcgcgccatgggttgctgggccgagccgttccattgcacccagtcgaaggtccagatatcccacaactgcgggtagtccaccgacgcgttggcgacgcgataattgtccggggaaatcgcatcgccaaagctggcgttggcgatacggccaaaggcgtcggtgcggcccgggccttcttcggtgggatagaggccgcgatgagtgtcgttccaggccactttgaggaactggttcagcgattgcttgaagtcctggcgcagttgtttgtgctcggcgtcgtagcgatcaccgagcacttggcgggcaaaacgctcgaacttccacgggttgtagtaggtggcggcgaggctggcgaccaacgcctggccgaaactgccgccgcgcagggtcggaacgctggagggcagtacatgctgggccgaaccgccgtcgatgcgcagggcctggcctttgaagtgcagctcgccggtatggcaggcggcgcaggtgatatccaggtattcaacgttgctgccggcgtttttatgccgggcgaaacccactggcaagttgccggggttctgcgttgtgggcacctgcttggggtcgaccaggaaaccgaagcgtgccaggtagtcgggcgtggcaaaacgtcgctcggaaaacggcagttcgagggcggtgaaccagtcgtagtgcaggccttttacttgcgtgccctggggcgtgaagtaataggtctggcggtcggtggcactccattggtcctggtagtgcacctgctccacaggcacgtagtccggcagcttggggttgatggtgtaatagagcaccacgcccagcaccagggccagcagggtgaatatcaggagtaaaacacgggtaaaaatgcgcaagatggctatccttgtctcggccttgtcgagttgtcgcgttgttatgccactacgccacaggggcggcaagtggccatgagcctggtagtaggcggtcccacgatccgtcgcgggcctgcatcatgaatgaaaatgcttttaaacacgtgaacttatcggaagtttcctgctcacatgccggtagccattggtcgtggccgcctgataagctcgcgactttattcgaatgcccttttggcgcatgaacaaggaaatagcatgaaacagcatcggttggcggcggcggtggccctggttagcctggtacttgcgggttgtgattcgcagaccagcgtagagctgaaaaccccggcgcagaaagcttcctacggtatcggcctgaacatgggcaagagccttgcccaagaaggcatggatgacctggactccaaagctgtagcccagggcatcgaagatgccgttggcaagaaagagcagaagctcaaagacgacgaactggttgaagcgtttgccgcactgcagaagcgtgctgaagaacgcatgaccaagatgagcgaagagtcggcagccgccggcaagaaattcctcgaagacaacgccaagaaggacggcgtcgtcaccaccgcttccggtctgcagtacaagatcgtgaagaaggccgatggcgcccagcccaagccaaccgacgtggtgactgttcactacaccggcaagctcaccaacggcaccacctttgacagctccgtggatcgcggcagcccgattgacctgccggtcagcggtgtgatcccgggttgggtcgaaggcctgcaactgatgcacgtgggcgagaaggtcgagttgtacattccttccgacctggcctacggcgcacagagcccgagcccggcgattccagccaactccgtgctggtcttcgacctggagctgctggccatcaaggacccagccaaggctgacgcgcctgctgcaccagccgccaagaagtaatcggcgcctgaacacacaacgccccgtctcgacggggcgttgttgtttctggggccagcaggcacctgaatgtgggagggggcttgcccccgattgcggtagatcagtcacttatgctgtggctgaaccattgccatcgggggcaagccccctcccacattagagcttggcgaattcaaacgaacgtctgcagccggttacagtctgatataagactcgagtacgggtagccgcacatcaacgccaagtcaatgaaatcttgggttttttttcagtgcgcaaaaaacgcccgatctgactgcaagccttgtactacgtggctttcagcccggaaaataggctctgttcacaaggttatccacaatttgtgtggataaccttttatgtcgcctggaactggagtgacgaatgaaaccacccttcaatttcacccgtttcctgcccatggccgcacgtctcctgggtcgcgggcgcttgccgacgctgttgtttgcggtcgccgccaaaggctcgagccaaggcaaccgcctgggcaagctcaaggatgatctcaagttgctccaggccctgtgcctggcttactggcgcggtgagtaccgggccatcagccccaaggcgctgatctcggtggtggcggggctgatgtatttcctcagcccgattgatgcgatccccgactttatcccggtgttcggcatgctcgatgacattgctgtgctggcatgggtcatgaagaccctggacggtgaactgagcgcgtttcgcgcctggcgagaggcccagcgcccggaaaagctcgccgtggttgagcgcctgcctgcgacgccctcgctgctggcccaggaaaacccgcaaaaaaacccatgacttggctatcccctgcgacctttgtggctgttaggattacactcctaaggaaagagcttacttagtaagtgcagttatcctacggggcagtcatggatattcagataatttcacgtaatggcgaacccgaatatgcggtgttgccatgggatcagtaccaggcgctgctaaaagctgccggtcagcaacagactacgctacctccttcctcatcgactgcccaagccgcccctgcacaggacctgcgcccgctcgccgacctgcgcggcttgcgcgaagccaagggcctggcgatcgagaccctggcccgcaccgtgggcatcagcccgtcatatcttggattgattgaaagtggtgaacgccagccggatgccgcgatccgccgcagcctggcctgggaattgggcgttgcaggttggagggatgaatcttgagcctacgtatcagccgtcaacactgggatggattactcaacgaactggaccaggcgcgccgccagcgccatttgctgacttaccgtgcgctgctggagcgcctgcaatttcccaccccggccatgcagaccctggccgccgccttggaacacctggcggcgctggacgccaaggccgagcagccattgcgcagctcgctggtgatcagccagggtgccagccgtttgccgcgtaccggtttcttcgagtgtgtggagcgcctggggcgtttcagcgggccgtccgatggcgtggccgccgcctcctggcacgcgtcggaagtggtgcgggtgtttgaatacgagtatcccgagtccgccgaggcctaaagcgcctgggagagtgcgtccatgctgtcgatcacatggatgctgtagccggccatatccttggcatggtgcttggcctgcgacgccaactccgccaactggctggcatcgagttgtccacaggcctgtggatataaatgcaccacgccgatggacagcgacagcagtgcaaactcctggcgcacgccctggcggttcaacgccacgaaacagccggcctccagatgctcggcgcggtagaagcgccggcattgggtatggaagtcatccagcagttggttgagccgcttgcgccagtcctgcgggccgagcaccagcaaaaagtcatcgccgccgatatgcccgacaaagtcgcggctgggatcgacgcggtcgttcaggcactgcgccaggcacagcaacacctcatcgccacgcccatagccgtagatatcgttgaacggcttgaagctgtcgatatccacgtaacagatcaccgactcgcgctgttgttgcagcaggcgtgtgaggcactgctggatcggcacgttgccgggcagcagggtcagtggattggcgtagcgcgcctgctggatcttcagctcggtgatcagcttgagcacatcgatcacccggcccaggcccaggtaatcgccattgagggtgatgatgaaatcttcttcgatgcgttgccgcgcacggctggtgagcaggcggctgacctgttgcagcgactggctcaactccaccgcgaggaagtcggtgctcatcaagcggctgatgggcttgcgcgcaaacaggtcggtggcgaacggcttgagcagcgcatccgacagcgaatgccggtgcacgataccgaccgggtggccacggccgtccagcactgccagggagttgaggttggcctggcggcggaacgcttcgagcacctgggcagtggcggtgtcctggtccactgccggctgttcgctgagcagggcgctgaggtcgctgccttcctcgttcagcgccacgttggcgctgtcgggcttgggcagcatcagccgcgcttcctgcggcggttgctcctgtggacggcacagcaggtagccttggaccaggtctacgcccatctctgtcagcaccgccaactcttcgggcaactcgatgccttcggcgatcacctgggcgcgtgacgccttggcgatctgcaggatggagccgacaaactcgcgcttgagcgcatcctgatggatgccgtcgataaagtgtcggtcgatcttcacgtaatccgggcgcagctccgaccacaagcgcaggctggaatagccggcaccgaggtcatccagggcaatcgagaaccccatgttgcggtagtggtgcagggcggtttgcaacaggtcgatatcgttggtgggggtttgttcggtgagctcgatcaccacctggctcggtggaatgccgtagtcgtgcagcagttgcagggtgcgccccggttggtgcgcggtttccatcagcgattgcggcgagacgttgaggaacagcttgcccggcagcttctgctcgctgaagcgtcgacacgcgctttcgcggcaggccatttccagttcgctgaggcgtccggcctggccggccacggagaacaaggcgacgggagagtgcagcgggctgttggacgggccgcggctgagggcttcgtagccgagaatacgccgttcagacaggcaaatgatcggttggaacaggctgtgcaaactgccttgagccaggatagagcccagtgcattcagctgttcggtcatggtcatggcgatctcgatcgaaaaaaaaggaccgcaggcttgaaacctgcggtccttcatttcacgacagaatgatgtctatatgatgacactccagggagcgatcacattaaatcgccatcatttactgcttggccacctgcttgctgatcttcaggtagtccagcaggatccggccggtctcggccaggtaagcgtcgtcttccggcttggttttttccgcttcggccggcagcgcgtcttcgtcttctttcttcagctccttgagtggatcctcacccttggccttgcggcggatgttttccagtacgagttgcttgttttcgatgtcggcgtgctgcgcgcggcggtccacttcgttgaggctgacggttttttcttccatcagcttcttggccagggccagcttgtcgcggatgaacacgaactcggcatccttggcggagcgggtgtcgtggtcagctttcaactgtgccaggaacggtttgaacggatccgacgccggcttgatcgcagggcggatggtgtcccacggcatggcttccggcagggcgctttcgccgatttccttggtgtcgatgatcgacgggaaatcgatgtccggcagtacgccctggtgctgggtgctctgtccggaaacccggtagaacttggccagggtcagtttcagctcgccatggttcagcggctggatggtctgcacggtgcccttgccgaaggtctggccaccgatgatcaaggcgcggtggtagtcctgcatggcaccggcaaaaatctccgaagccgaggccgagaggcggttgaccagcaaggccatcgggcctttgtagaaggcgcccgggttctcgtcttccagcacgtcgacacggccgtcagcgttgcggaccaacacggtcgggcctttgtcgataaacaggctggtcagctcggtcgcttcctgcagggagccgccgccgttgttgcgcaggtcgatgaccacgccgtcgactttttccttctgcagttcggtgaggattttcttcacgtcgcgggtggtggacttgtagtccgggtcgccggcacggaaggccttgaagtccaggtagaaggccgggatttcaatcacgcccagcttgtagtccttgccatcctgcttgaggttgaggactttcttctgcacggcctggtcttcgagcttcaccgcttcacgggtgatggacacgatcttgctggtctggtcgttcggtgcattggtgtgcggaatcacttccaggcgcaccacgctgcctttcggcccacggatcagcttgaccacttcgtccaggcgccagccgaccacgtcgaccatctctttgtcgccctgggccacgccgatgatcttgtcggccggagcgacctgcttggtcttgtcggccgggcctgccggtaccaggcgcacgatcttgacctggtcattgtcgctttgcaggacggcaccgatgccttccagcgacagactcatgttgatatcaaaattttctgcgttatctggcgacagataattggtgtgcgggtcgtaggacatcgcgaaggtgttgatgtaggcctggaagatatcttcggcacgggtctggtccaggcgcgccagttgattcttgtagcgcttggtcaacagctcctggatggccttgggctctttgccggcgatcttcaggcgcagcacttcgtccttgacgcgtttgcgccacaggtcgtcaagcgcggcggtgctggtcagccaaggcgcgtccttgcggtccaccagaagggtttccttctgggtgaagtcgagcttgtcgacgcctttgcccagctcactcagggcgaagtccagacgcgctttgacgcggtccaggtaacgcttgtagatggtgaacgcgggctgcaggtcgccgctcttgaggaagtcgtcgaactgggtcttccacttgtcgaactcagcgatatcgctggccaggaagtagctgcgcgacggatccagcagcttgaggtagctgtcgtagatgatcaccgagcgagcgtcgtccagcggcggcttgctgtagtgatgacgcttgagcaactcgacgacgttaaggctggcaatcacctcatcgcgatcaggttgaagattgtcccagctgttggctgcgaacgtattggtcgacatcgacgcgaagccgagaccaatgaatagagcgagggcggtgctggggaacagatgcttcatgctgattcgacgcgggggcaattgataacgcatattaggccgtctttgagggagccggttccatatggtccggtcgcataatgcaaaaagcccggcgatacagctacgggctcagtccagactcactatggaggcactgtgaaagcattgcaaggcgttgacggtcatgtggagtggttggaagaacccagtcctacttgcgatgtagggcaagttcgtattcgtgtggcggcagcgggcctcaatcgcgccgatttattacagcgggcggggctctatccgccgccgccgggtgccagccacgtgctgggtctggagtgttccggggtgatcagcgaagtgggcgccggctcgtcctggcaagtcggtgaccgggtttgcgcactgctcgccggtggcggcatggccgaggaagtggtggtggatgcgcgccacgtgctgccggtgccggaaggcctgtcgctggtcgaagcggcggcgctgcccgaggtgtacagcacggcgtggctgaatctgttccagttggcgggcctcaagcccggtgaaaaggtactgctgcatgccggcgccagcggcgtgggctcggcggcgatccagttgtgcaaggcgtttggcagtccgtgctgggtcagcgtcggctcggcagagcgcctgacctattgcgaggagctcggtgcacagggcggcgtggtgcgtaccgacggcatcgaggggttgcgggatttcgggccgttcgatgtgatcctcgacccggtcggtggcaactatgcggcgctggacctcaagctgctggccctcgatggtcgttgggtgttgatcggcttgatgggcgggcgtgacgcgcaactggacctggcccaggtactgggcaagcgcattcagttgctgggctcgaccttgcgcagccgcagtgatcagttcaaggccgacctgttcagcgacttgagccagcatgtgtggccgctgtttgttgaagggcggctgagcccgcagttggccaggacctttgcgatcaaggatgccgaagcggcgtttgccgagcttgcgaccaaccggatttccgggaagttggtgttggtgattgacgaaagcctgagctgaattgtaatgcgtttaataatgtgggagggggcttgcccccgatgacagtgnnnnnnnnnnnnnnnnnnnnnnnnnnncactgtcatcgggggcaagccccctcccacatttttgatctcggctcaatcagacccagtgatggatcggccagccggccttttcggcatgctcgcgcaacaccggatccgggttcactacctgtggatgttccaccttcagcaacaacggcaaatcattgcgcgagtccgagtagaaatacgcaccgtccagcgtttcaccttcctgctccagccactccagcaagcgggtgatcttgccttcacggtaggtcaatacaccctcggtatggccgctgtacacgccgtgcttcacttcaaggttgatgcccaacacctcatcaatgccgattcgtgccgcaatcggtgtaaccaggtgcgtgccggaggcagagatcaccaggatccggtcgccattcgcacggtggcgggcgatggtcttggtggcgtcgctgtagatcagcggttcgatcacgtcctcgacccacggctccaccaggtgttcgatttcctccggtgtgcggccgatcatcggttcgaggctgaaagccatgaagtcttccatcttcaactggccctggctgtaggcgtccatcagctcgtcgttcctgcgcatgaacgactcagggtcgacccagcccaggctgcccatttgctcgctccacagggtggcgcagtcgccgtggatcagtgtgtcgtccagatcaaaaattaccaatgccatccgtcatgctctctcaataaatcgtcgctgctcaggctacttcacacagggcgctggggtcgatggaaagtgccaggcgttgcccgtccgggtgcaggtcgtcggccgagcggttgagtacgtctaccaccagttccacgccacgggcttcgatgcggtagcggatcacgttgcccagcaggctgtggctgcgcaccagggcatccaactcaccattgcggctcagctcgatggcctccgggcgaatggcgatacggctgttgatcgggcgttgcagcaattgggtggccttgtcggcatccagcaggttgtagttgccgatgaacccggcggcgaatacgtccaccggcgcggtgtagagagtctcggcatcgccgctctgcacgatcttgccctggttcatcaggaagatccggtcggacatggtcagggcttcttcctggtcatgggtcacgaagatcgtggtcaaccccagctcgcgctggatctggcggatctgctcgcgcaggtgcttgcgaatccgtgcgtccagcgctgacagcggctcatccagcagcaacaggcgcgggcgcgtgaccagggagcgggcgagggccacgcgctggcactggccgccggacatctggtgcgggtagcggccggcgaggtccttgagttccaccagttgcagcacttcctgcacgcgcttgtggctgtcgtcggcgttgaccttctgcatgcgcaggccgaaggcgacgttctgttccacggtcatgttggggaacagcgcatagctctggaacaccatgccgatatggcgtttctgcgggctcagcgggacgatgtcctgcccatccagcaggattttgccactgtcgaccgaggtcagcccggcgatgcagcgcagcagtgtggacttgccgcacccggacgggccgagcagggtgacgaattcgcccttggcgatttcgcagttgatatcactgaacaccggggtgccggcgtagcctttctgcaggtgttggacgctgacgaagctcattggcttttgtccttgttcaagatattggcggcccaggtcagcaccagcacaaagaagaagtaggaaatcacgacggcactggtgaagtggccgctgctgttgcgcatgttgttcaggtacacctgcagggtttcgtagcgggtgcccacgaggatgttggcgaacacgaactcgccgaacaggaacgagaacgacagcaacagcgccaccatcaagcctttgcgcaagttcggcagcaccaccaggatcgccgcctgccaggtgctggcgccgagtagttgggaggcgtccatcaggtcgcgcaggttgatcgcttgcaagttgttggtgatcgcccggtacatgaacggcagcgcgacggtgaagtagcagccgatcagaatccacggcgtgcccaccatcgcaaagggcccggagccatacagttgcagcaggcccaccgacgacaccaccggtggtaccgcgaagggcagcaggatcaggatgttcatcagcgcatcgagcttgggaaagtggtaatgcaccacgaacaacagcggcaaaatcagcaccaccgacagcaccagcgcacccacgcacaccagcagcgattgcccgaaggccatcaggaagcgcgggtcgctccacagctgcacgtaccatttcaccgtgaaaccagctggcaggattgttgccgaccaactgctggcgatggagtagacgaaggtgcccaccaacggcagcaccaggattgcaaataacagccacaccaccacacggtggtagagggaggccgggccggcttcagcgcgagacatggtagctcctcttgagcagcagttgatggaccacggtgaccacggtcatcagggccaccagcaccacggccagggcgctggccaggttcgggtcaagggacacgtcaccggacaccagccccgcgatacggatcggcagtacgttgaagttgccggtggtcagcgcatataccgtggcgtaggccccaagggcgttggccagcaggatcacgaatgtaccgagcagggccggggtgagcaccggcaggccgatatgccgccagaactgccagccgttcgcgcccagcagcgacgccgactcgcgccagtcttcgcgcagcgcatcgaatgccgggtacagcagcagtacaccgaggggaatctggaagtaggtgtagagaatgatcaacccggtcttcgaatacaggttgaagtcctgaatgatccccgcctgcttgagcatgatcgtaatgctgccgttgaaacccagcaaaatgatgaaggcgaacgccagaggcacaccggcaaagttgctggtcatgttggcgaaggcggtgacgaagttgcgcagcggcgagtccacccggcgcagggagtaactgccgagggtggcgatgatgatgccgaacacgctggagtagaagctgatctccaggctgaactggatcgcttgcaggtagaacttcgagctgaagatgcgcgtgaagttttccaggccccagccagcctcttcggtttgcagactgttgatcagtacccacaccagcggggcgatttcgaacacgataaagaacagcgcgaaaggtaccaggcacagcagcgctagccatttgcctcggatcatttcaacagctcccggcatacaggtttgtcgtggggtacgcccagcagctcacagacggtgccgcacagctcggtctgtttcggtgcggcgcgggtgtccaggctgaacgcagcgcccagcacaaacagcggcacttcgcgttcttcggggagcaggccattgtgggagcggtcgttgttcatgccgtggtcggcggtgaccagcacctggtagccggcatcgagccaggtgtgcaggtagtcggccaggatgatatcggccgagcgtgcgctgttgcggtactgcggagtgtcgaggccgtgcttgtggccggcgtcgtcgatgttcatcggatgcaccaccaggaagttcggcgcgtgcctgaggcgcaggctttcggcgtcggcgaacaggtgggagtccgggtagtggtcattccagtagaaatgcccgtgctggatcgccagcgccgtgtcgtcggtatgacggtcgcgggcggcgaggaagggcgtgcggttatacaactcgctgacccagtgataagccgccgctgccgtggtcaggccggcgtcggtggcgtaatggaaaatgctgcgctggttggacaggcgcgagacgttgttgtggacgataccgctctggattgggggtacgccggtgaggatgcattcatacagcgggcgggacagggcgggcagttcacattccagtttgtacagggctgcgcgtcctgcgccgacataggcctgcaagtgccccatggcgtgccgcgcaacctcgaagttcaggccgtcgagcacgacaaggatgacattgtgcttcatggggggaggcgctccgcaacgatggacttgactcaatattcctggtgcatctgggttcaagtgtgggagggggcttgcccccgatagcggcgtgtcagtttgaatacctgtcactgatccaccgccatcgggggcaagccccctcccacattggatctccagtggagtccagtgtgaggtggcaggcttacttcatctctacgatgacttgctcgttccacaactgaggcagcttcttggacgtggcttcccaggcatcggcatccttgatcggctgcgggttggccttggtgtactgctcgcccggaatcaggttcttggcgatctcggccggcagtttcaggtcggtttcagcgcggatcggacgcgcattgcctttggccaggttgagttggccggcgtcgctgaagatgtactcgcgggtcagtttggcggcgttcgggtgtttggcgtatttgttgatgatggtggtgtagccggatttcaccgagccgtccgatgggatcagcaccacgtagtcatccgggttggccatcttggccttgtagctcaggccgttgaagtcccagaccacgcccacttcgacttcgcctttttccatggtggcgatggtcgggttggacagcgagagacggccttgctgggcgatcttggtgaagaattgcaggccaggggcgatgttcttttcgtcacctttattggcaatggcggccgccagcacgccattggccgcttgcgccgcggtgctcacgtcgccaatggaaactttgtatttgcctttttgcaggtcagcccagctggtgggcacgtcagaaccgtgcagcagtttcttgttgacgataaacgcgatggtgccggtgtaggccaaggcccagtgaccgtccttgtccttggcccaatccgggacctgggcccaggtggacggtttgtacggcagggtgacgtcctgcttcaccgcaatcggaccgaacgccgcgcccacgtcgccgatatcggcactggcgttgtctttctcagccttgaacttggcgatttcctgggccgagctcatgtcggtgtcaatgtgcttgaggccgtaggtcttggccaggtcttcccaggtgcctttccagttggcccagtcatcgggcatgccgacgctgttgacagcgccttctgccttggcggcagcttccagggtttttagatcggtatcagcggccatggcggcggtgcacatggcaatggtcgagcctaacagtgatgccaggaaaagctgtttcatccgaagctcctttgggcgttttcaacgcggcggttgtttctgcggtgttgttggtctaggtcagagcaatacctgagccaatctaggctcgatggatgacagtttcatgtcgatgtcgtttttaaatcgctgatgtcgctcgtcgcagagtgagcgtagaccatgctcaagcgcccgcagggattggacttggccgatgtattgcagggtgtgctgcgacggatgcacacggactgtcatctgtcggtcatctgtaatacctaggctggcactcaaccgtgcaagcccctttacgcagcggtttgtgcaccttgtcggtgctggtctagtccagataggtaacgttgatgcgtgatgaggcaatcaaggcggtgacatccatcggcctggcgctgcaagagcagatcgaccacggcctgttgccgcctgccagcaaactgcccgccgagcgtaagctcagcgagttgttcggtaccactcggattacggtgcgggaagccttgttacaactggaagcccagggccagatctatcgcgaggaacggcgcggctggtttgtctcgccgccacggctggcctacaacctgatgcagcgcagtcactttcacgcgatggtcagcgaccaggggcgggtggcttccaccgaggtcatctccgcgcggctgcaaccggcgtcggcggcggtgtgtgcgtggctgcagttgccggcgctgtcgagcgtgatccagatttgccgtggccggcgaatcgatgggcgcctggtgttgtatgtggagcactacctgaacccgcagtattttcctgggatcctggcgtgtgatctgaatcagtcgatgaccgagttgtatgcgcgcaagtacgacctgcactacgggcgggtgcgtttcgagatcgtgccgacgtcactgccggtggaggccgccgcggcgttgcgcgtgtcggtgggcagcccgggcttgcgtatcgcccgggtcaactatgaccagcatcagcggttgatcgactgcgacctggagttctggcggcatgatgcgattcatgttggtgtggatgttatgggatcagcgccttgatcacctggtccacattggtttccagctccgccaccggttccgcaccgtccacattcagcaccagcagcttggcgccacttgcagtcaccgccgccgtcaccgcctcgctcggctggcgatgatgcagcaccaccgccacatcgttgtccttcagctcggccgtgagcttctgtaacgcctcgggcgtccagtcggtatccggccgcgcatcggtgctgagcacttccaggttcaaactgctgatcagataagcaaagtgatcactcaggctgaccacgctcaggttgtccgccttggccaggcgcgcttcgctgtcggcggtgagtttgagcaggcgctgcttgagggcggcaaggttggcgtcgattttcggcttggcatccggggccaggcggcccaggtcggcggccagtacatcggccatgcgccccatattgttgctcgactgccacggctggctgttcaggccatcggcaacgcccggctgtacggcgatgccgggcaagccaccatctaccgggcgggcggcgtcgacttcgacgatgcggatattgctgcgccgcgccaccgggtacagcgggtcatcggcccacaatgagcgcaggccgatggcggcgtcggcgtccagcgccaatttgctcagggccggcgcgccacgcccggtgaagtaggacacctggcgtgaacccggcaagttggccggcgcggcgcgctcaagctgtacgttggtgcctttgagcagcacctcggccaggccgtaggtaatcggcagcgaagcgaggatcttcacctgttttaccgaagtggccttgctcagtgcggcgtggcccaatccctgatggatcttgagaggcttgggctctaacccgtcgaccgccagggccgaagtgctgatgaaacatgtgatggccagagccaatggacgaagtacaggatgcattatccaagattccctttgaggctgggcaccgtgccgcgcgcgatggcggccagggcgaaggcgataccggcgaccaggatgatggcggcgccggacggcacgggcaggtcgaagatgatcggcagcaggatcccgcacagggtgctgactgtggcaatggcgaccgagacccagaagaagcccttgagcgactggctcaacagccgcgccgcagccgccggaatcaccaacagcgcccccaccaggatcgcaccgatgaccttgaccgccgcgacggtgatcagcgtcaccaggatcacgaacaggtagtccagggttttcacggcgacgccgcgtaccgccgccagttgcggattgaaactggccagcatgatgcggttgtacagcggcagcgccagggccatcaccagcgaaccgacaatcgccagcaccagcaggtcgttgccgttgaccgtcaataccgagccaaacagcacgttctcgaggatgtgcacgttgatcttgcccgccaggatcagcaacaggctcgcccccaatgccagtgacactgacaggaacaccccgatcagggtgtccggcgccaggcccgtgcggttgcgcaggtagttgagcaggatgccgaacagcaggcagtagccgaacagcgcgccatacggcccggtgtagggctcacccagcagaatccccaccgccacgccggtcaacgcagcgtggccaacggcttcggagaaaaacgcgaagcgcttgaccaccaccagcgtgcccaggccacctagcaccgggccgatcagcaaaccggcgagcagggcattgaccacaaaaccgtaggccagcgcctccggcagataaccggaagaggcccagccctggaccatcaagcgaaaggcttcataactcattgcgccgggctccgagggtgggtggagaacagggtcagcaggcgctccggggtcagtgcctccttgggcgtggcgtcgaacagcacgcggcggttcaggccggtgacgcggtcggccaggcggcccacggcttccaggtcatgctcgatccacagcacggtgatcccggccaggcgccagtcattgagcaggcgctcgaacacctggataccggcttcgtcgagggccgacatcggctcatccagcaccagcaggtgcggcgccgggatcagcccctgggccagcagcacacgctggcgttcaccgccggacagcgcgcccatgcgccgcttgcgtttgtcctgcatgccgacgcgctccagcgcatccccgatcgcaccggcgtaatgcttggacaaaccgaggaaagccgggcgccgttggcacatggcggccatgaaatcatccacggtcatcggcaagccccggtcgaactccagggcctggggcacatacccgatggtgccgggcgcggccggccaatgcaggctcagccgaccctgatggggcgtttgcccgagcagggtcttgatcagcgagcttttaccgccgccgttggggccgaccagcgcatggatgctgcccggctgtacctggaaactcacggtatcgaggatcacggtgcgacccagggtcagcgatacctggtcgaactcgagcgtcgggccgacgctgaccgccttcagctgttgcgccgccgtcatgccccggactcctgaatcgcccggaccaccgtattgaggttgccggtcatttccacttcgtacttctcggcgctgtattcgccgtaggaaatatgtgacagcgggtacagcttgaccccggactcacgctgaatggtgtcgacgtaggtggacgggaagtccatctccgagaagatcaccttcacgtccagggcgcgcagttcgtcgatggttttcttcaactggctggggctgggctcgatgccatgggccggttcgaccacggcggtgacttccaggccgaactcgcgcaacaggtagtcgtaggccgcgtgcacggtggccacgcgcaggtccgggttgggcgcgctggtcaacttggccagggcatcggcgcgcatctggcgcaggcgcttgccgtaggcgcgggcgttctgggtgtaggtcttggcgttgtccgggtcgagcttgcccagttcacgggcgatgttgttgacctgggcaatcgatgcgctgatcgacaggaaggtatgcgggttgaccactttgcccgcgccgcgtgcggcgttgccggtggcggccagcaacggcacattggcgttggcttcgatcaccgggatgtccggacgctcgctggtggcgatcatgcggtcggcgaaatcgtcatggccgacgccgttgagcacgatcacgtccagggtgccgatgcgcttgatgtcttcggcgcgtggctcgtaggcatgggggttgaagccggccggaatcagcggcaccacctcggccttgtcgccgacgatattggccacgtagctgtaataagggtgcagggtgatgccgattcgcaggcgtttggcggcttcggcattggccagaggggcgagcatcaggctgaacaggccaaccagcaacaggcgcaacaggggcgatgaaatagacatgggcaatcggtcttctcgttcagtgacggtgctggcgggtgacgccggcatcgaattgcgcaaccacctgctgccagccggctgcgatcagcgcctggtcagagaggtcggagggagcggcgaggttggcctggcgattgagccagatgtccggctcgacaccgtgcacgcgcatcagcagtgaaccgctggtcgccggcgcctggctcacacccaggtaggccgaaggctccagcaattgccagcggtgatcgccacggctgaccgaactggcatcctgggcaaagggagcgaagccttcttcggccagttgcgccgggctgggcagcgcgctttgctcctgctgcaacagttggatctcatccagggtcacccgcaggtcggcataaatgccttgctcggcggcgctcaggtcgcggcgggcgtccaattggtggctcggtattgccgccacctcctgggattcaccgtgcagcgcgaccaccgagccggccaccgcgaggatgatcaggcacaacagcagcacgtagagggtttcgtgaccggcaccggcggggcgtacaacctgtgtggtactcattgcggctggatatccgcttggtcgatttccaccacatggccgggaccggcatcaaacagcacgtagaactcggcggacggtttcttgaaggtcagggtcgagtcctgaccgagtttgccgggcaccaggatggtttcgtcatagccgatcacgtccagggtcacgccgggtgcaccactgccgtcggagaagccgcctttgcattggatctgctcgccggggatctccttgcactcgcacatcgggttgtgggcgagcgcgacggtgctgaagccggcacctatcaacaggacgccacaggcgcgggtcaatcgcatcaaattcatggtttaactccttgcttgttcagccaggcaatcgtggcaggcgaggcctggctcaacgggatggaaccctggtgcatgctgccgtcccagccttccatggtcacccacagttcggcgtcgacgggcgtgcgttccgggatcggcaggccggcgcccatgcggtacggcgtgccgaagaagatcaccccggcagcccgcaggctgcgcggcttgccgatgcgcaggtaggtggccttgacctggtcggcacagctgtcgcacagggcggcgttgaagaacttcatcgggccggccgggtcgggacgcgggccttcattgcgaaactcggcaagcttcaggctccacgggccgacctgcacgtcgccagccactcgctcgccgataccggtgtcgccgcgaaacagtgccgcatcggcaaagtacttgggcatgaagcccagcggcaccagcaacagcagcacgttgatatggaaacgccatttcagccagaacgcccgcagaggcgatggctttgccgcagcgaccttgctcatgagttggcctccgaggtttctgcctgccgggcggggagggaaaccggtttgtgttgagccttggcttcacgcttgaaggcattgagggtggccaaagcggtgcgcttggtccagatcagcaggccgctcaacaccatcatgctcatgatcaggccgaagaatgcccagatcagcttgatccagatcccgccgaagtcgccggtgtgcagcgggcgcatggattcggtgacgaactccagcttcgagcggtcggacagcaggtgcgccgctgccacttcaccgtcgtaggggttgatctgtgcggtctggaacatcaacgggtaccagccccgcccgccgatctgcaggtggctgtaggcattcaggggcaggctgatgaaactcgcctccaggccaggaatgcgctgggtggcgatcttgatcgcctcgtccaccggaatcatgggggccggcacgccaggcgcggacatcggcactttctcccgggcaatcacggggatgaccggttcagtggaaatcgaaatctggttgtcgcccaaaatcgcgcggatcaggaaccagatgccggtgaccgagatcaccgcaatgaaccagatcgaccagatcccgctcaagcggtggaagtccccccagaaaatccgcgcgccgtggcggattcgcagggtcgggcgcaggaagcctttccagaaccgcttgtacaccaccagcccggtgaccagcgacgccagcagcgggatgccgagtgccgacaccaggtaccagccccagctgtagccgttggtgaagggcaccagccaccagccatgcagggcgcgggtgaattgctggaagttgaaggacgggctgatgccctggatcgccccggtgtacgggttgacgtagacctccaccgaacgcccgtcggggtagctgaggtcgacgctcaaggcaaagtgcgactcgtcggggcggctgatcgactgcacgtacacctggggttcgtcgcgcttgatggcggcgatcacctggtcatagctcagcggttcggcatcgtccgagggcttgctcgcacggatatccgggttggccagccagacgatctcctggctgaccaccgccagggtgccagtgacgcagacaatcagtacaaagaaccagataggcaatgccagccagctatgtacgagaaaccagagtttggagcgtgacttcttcgacatgtgaatgagggtcttgatcggaggggggcaatggaggcccggaaaaggccagtcgtagcttttgctgacgcgacgggctgtatctaagttaagacggatgagaatgagaaatccctaaggcggatatgaaagaaaatgtttcaggttcacattcagggcgctttttcgccttgatcgaacacgaaacatgttccaagccatcacccaggcgccattgatggggcggggcggctgcgtaggatgggcgcataccgttgagcgagcgcctacaaaagtgagtttagaaaaatgactgcccgaaccctctacgacaaacacatcgattcccacacggtgtgccccctggatgaccagggccatgtgctgctttatatcgaccgccaggtgatcaacgaatacaccagcccccaggccttcagcggcttgcgtgaggccgggcgtaacgtgtggcgcccaggcacggcgctggccgtggtcgaccatgtgaaccccaccacgcccaagcgcatcgcggcgatgcccgacgcaggcggggcgcggcaagtgtcctacctggcggagaactgccgggacttcggcatcgagctgctggacatcctcgacaaacgccagggcatcgaacacgtgatcgccccggagcagggctttatcctgccgggcatggtgatcgccgccggtgacagccacaccaccacctacggtgccctcggcgccttcggttttggcatcggcacttcggagatcgaacacctgctggcgtcgcagacgctggtctacaagcgtctgaagacgatgcgcgtgagcgtggacggcaatctggcacccggcctgacgtccaaggatgtgatcatggcgctgatcggcaagatcggcgcttccggtgccactggctatgccatcgagttttgtggttccactatcgatgtgctgagcgtcgaggcgcgcatgaccatctgcaacatggcggtggaggcgggcgcgcggggtgcgttcatggcgccggacgaaaaagtcttcgcctacctcaagggcaagccgcgtgcaccacaaggcgagctgtgggaccaggcgctggtaggttggcgccaactgcactcggacgctgatgcggtgttcgaccaggaagtgcacctcgacgccaccactctggaacccatggtcacctggggcaccagccccgaccaggccgcgcccatcggcgcccgcgtgcccgacccgcaggatgtcagcgacctgatcctgcgccaggacatgcgccgcgcgctcaactacatgggcctggaagccggtatgccgctgagcgagatcgtcatcagccatgccttcatcggctcctgcaccaacgcccgcatcgaagacctgcgcgacgccgccagcgtggtgcgcggcaagcgcgtggctgaacacgtgcgggcgatgatcgtgccgggctccaccgaagtgcgtgaccaggccgaagcggaaggcctggcggcgatttttatcgatgccggctttgaatggcgccagtcgggttgctcgatgtgcctggccatgaacgacgacgtgctcgcccccggcgaccgctgcgcgtccagcaccaaccgcaacttcgaaggccgccagggcgcgggtgcacgcacccacctgatgagcccggcgatggtcgccgccgctgcgattaccggccgccttactgatatccgccactttggagcgcgcccatgagcctgcaacccttcaccctggtcaccggcaaggccgcgccgatgctggcggccaacatcgataccgatgtgatcatgcccaaacagtttctcaagggcatcgaccgcagcggtctggaccgcgggctgttcttcgacctgcgtttcttggcgtccggcgagcccaaccccgagttcgtgctgaaccagccggcctggcagggcgcgagtttcatggtggtcgggccgaacttcggctgcggttccagccgagaacacgcggtatggggcttgaagcagatgggcatccgcgcattgatcggcagcagctttgccggaattttctatgacaattgccagcgcaacggggtgttgttgatcaccttggacgaggcggtgttgcagcagctgggcaagaccgtcagccaggcggaccaggcgcagatcaatgtcgaccttgaagcccagcagatccatttggcggatggccaggtgatcccgttccagatcgataccctgcgcaagactgcgttgttgcagggcctggatgccatcggcagcaccttgcagcgcagtgacgagatcaaggccttcgaacgccggcacctgcaagccaacccctggctcacctgacatacttaggcctaaatgtgggagggggcttgcccccgatggcgatgggtcagtcaacttctgagtgactgacactctgcaatcgggggcaagccccctcccacatgtttatccggatcataccgcttagattgagagccccttgaagtgctcctgcaaaaactccacgcaggcccgcagctttccggaatacgccaaccgtgtcgggtacaccgcccacacgttggcgctctgggtataaccgtgcagtatctgcacgagcttgccttgctccagcagcggcttaacatcccacatcgagcgcagcagcaccccgcgcccatccaatgcccactgcaacacaatctcgccattgttcgatgacagcggcccacgcacgcgcacgctttcctgggtgccgtcgcgctccaggttccagatgccaaacgcgttatcacgctccttgagcaccaggcagtcgtgctgctccaggtcgctcaactgttgcggtgtgccgcgtcgctccagataagccggggcggcgcacagtacgcggcggttgctcaccaggcggcggccgatttgctggccagggatgtcgtcacccacgcggatctccaggtcgaagccttcgctgacgatatccaccacgcggtcgaataggtccaggcggatttccaggtccgggtattgctctgccagtaacgacagggcgggggccacatggttgcgaccgaagccgaagctgctgcacaaatgcaggtggccgcgcgggctgtcatgggcgtcggagagttcatcggagagatgctggaagtcttcgaggatgcgcacggcccagcgctgcacccgttcaccgtcttcggtcagggcgatgcgccggctggtgcgatgcaacaggcgggtggccagggtggtttcgaggatctggatgcgcttgctgacatacgccggcgacaagcccagctcatcagcggcggcagcgaagccggccttgcggatcacggtcaggaacacccgcaggtcttcgggtaggggcacggtatctttcttgttagtcatcgcaaacagggctggcggcatgagccgccagaatagcaccggttgagcgcgccttccggcacgcccaggtgttgtcgattattcggcggcgaccttggcttgagcagccgcccgagcatcgcggccgcgcttgagagcgatgggcgccattttttcgcggtccagttcaccctcccaggcggctaccaccagggcagccacggcgttgccgatgatattggtcagcgagcggcactcggccatgaaacggtcgatgccgaggatcagcaccatcgccgccaccggtacggtcggcaccaccgccaggctggcggccaatgccacgaaccctgcgccaaccactgcgcctgcacccttggacgtgagcatggccaccgccagcaaggtcaactgttgctcaagcggcagatcaatattggtggcctgggccaggaacagcaccgccagggtcatatagatgttggtgccgtccaggttgaaggtgtagccggtcggcaccacgatgcccaccacgcctttggaggcgcccaggctttcgagtttctggatcaactgcggcaacgccgattccgacgaactggtgcccagcacgatcaacagttccgacttgatgtagcccatcaacttgaaaatgctgaacccggcgtagcgggcaatgctgcccagcaccaccgccacaaagaaaaacgcggtgatatagaaggtgcccaccagcttcagcagcggcagcaacgaacccaccccgtatttgccgatggtgaacgcgatggcgccaaaggccccgatcggcgccactcggctgatgatgccaacgatgcggaagaacacctcgctggcctggttgaccacacccaccagtggccggcccttttcaccgaccattaccaggcccacaccaaacagtacggagacgaacagtaccggcaggatttcgcccttggagaacgcatcgaagaaggttgcggggatcacgtgcaacaggaatccggtgatgccttcgccatgttcggcctggccgacgaagttggcgatggccgaactgtcgagggtcttcacatcgatattgaagcccacgcccggatgcaacaggtgcgcggcgagcatgccgatcaacaaggcgatggtcgagactatttcaaagtacagcagcgccttgccgccgacccggcccacctgcttcacgtcgtgcatgctggtgatgccagacaccaccgtgcaaaagatgatcgggccgatgatcatcttgatcagcttgataaaaccgtcgccaaggggcttgaggtcgatgccgatctgcggccattgatggccgatcaacacacccaatgcgatagcgatcagcacctggatatacagggttcccagcagttttctgattgtcattgttattatctcgagacgttgttttgggcaaagcgaacccgtcgcaggccattggcagcctgcgaggcgggcggatcagttcacggggtgacgcagttgctcagcgaaggaaggtcaggacttcgcccagcagcaactcaggggcttcttcagcaatgtaatggccggccggcagggccttgccacgcacgtcagtggcgactttctgccattccttgagcggctcgaagcagcgcccgacagtgccttcggcgccccacatcaccagcaacggcaggttcaggtgattgccggcgtcgatgtccgcctggtcgtgctccaggtcgataccggcggcagcccggtagtcctcgcagatgcccgtggcggcgcccggcagtttcaggcagcgcaggtattcggcgaaggcttcctgggtgaacggcttgagcccggcgctgcgactgcccatcacgctgcgcaggtacagctccgggttgccttcgatcaaggcttccggcaacggcgccggacggatcaggaaaaaccaatgccagtaggcacgggcgaaggcttcgttggtctgtgcgtacatggacagagtgggggcaatgtccagcaggaccatgcgttgcacggcggccgggtggtccagcgccaggcggtgggccacgcgggcgccacggtcgtgggccagcaccgagaacgtgtcgaagcccagcgcctgcatcagctcgacgccgtcccgggccatttcccgtttcgagtaattggtatggtggtcattggccggtggcttgctgctgtcgccatagccgcgcaggtcggcggccaccacggtgaagtgttcagccagttgctcggcgattttgtgccagatgacgtgggtttgcggatgcccgtgcagcaggagcagaccgggacctgtaccacctttgcggtagctgatgtccacgccgttgacgtggtactggtctttatggaatccggcgaacatggaatgactcctctttgtaattgcttgcatcctggaatcacgcggcgttcggggcaagggcaaaaacgtggagggggtgttcatgaagtgtgatgcaggagcgggctggctcgctcctgcaaagggtcagccctgtttgaacatggcctcggcgcgttcgcggatctgtgcttcggtcaggtcttccttgtgggtggccaggaaccacacatggccgaatggatccttcaacgtgccggagcggtcgccgtagaactggtccttgggttcggagatcggtgtgcccccggctgcgatggcttgtttgtaccgggcgtcgacgtcatctacatacacatgtataccgacgctggtgtggccatcgcgtgggctgccgaacgcgctttcatcgcagggtgaaccgagcatgatcggtgagtcgccgatgcgcagctcggcgtggccgaccttgccgtcgggcatgtccaggcgcatggcttcgatggcgccaaaggctttcttgtagaactcgatggcttcggcggctttttcgacacccaggtagggcgtgatgctgtggaagccctcgggaataggtttaacgctcatatcgttctccttgattgtggttgtggagggacggtcttttcactataggccacgtatcgcgtggcctgcgggcagccgacgaggtgtcgggggcgcatcatgcatggggtgtcggttccaacaactgtgcccctggcccgcgttcaccgagctggtcatcctgattgcgcaacgggcacgcttccagcgacaaacacccacaaccaatacagccattgagcttgtcgcgcagcaacgtcagcttgttgatgcgctcatccaggtcttgccgccacagcgcggacaaacgctgccaatcctgggcgttgggcgtgcgcccctccggcaatgtctgcaaggcttcgccaatcgttgccagcggaatccccaggcgctgggcgatcttgatcaccaccacgcgccgcagcacgtcccgtgggtaacgccgctgattaccggcattgcgattgctcttgatcagccccttggtctcgtagaagtgcagcgcggtgaccgccacaccactgcgggcggccagttggccgacggtgagtgccttgttgagcataaaaactccagataagtgcttgaccttgacttaactagaggttttagcctgcgtgacatcgaatcgcaagattctgcctacagagaaaggggagtgttcatgcaggtatctgagaaaaatcgcggcttcactcaattgatcgagtttcagatcgagccgcagcaacaatctgccctggtgtcagccctgagccttcagagcgaacgcctggcccaaggccatggcggctttatcaatgccagtgtgcaggtcagcgatgacggacggcgggtgctcaattacctgcaatggcactcgcgtgaagacggcgaggcggccttccagtgttttgagcacggcgaggaagatttctggacattgattcgcgcccaccaggccacggccgtgaccttcggttcgttccaggtgctgcgcagtttcgagcgcagccacgacaacgcgttgcactgccggctaaatggataggtgcagcatgcgctcaccttgcacgttttcgccggggcggcgcttgttcaccgccagttcgccgatcttgatcaggcgcgtacgtgtgacgttgcggctcaggccgagcaggctggcggtgtgcacctggttgtagtggctgaaacgataggcggcccgtagcagggcatcttcgactttttcatgcagggcgccggcctgttcttcgaacagcttctggaaggcccgcgctagcaacgcctcggcactgttgtcgctgccgtgctggctgtcgtcctggcgctcgatgcgcatgttcgacaggcgcagatcgtcgcgctcgatcacgccgttacggcagatcaacagggtatggtggatcacgttttccaactcgcggatgttgcccggccaactgtagcttttaagcttgtgctcagcctcgcggctgatggtgatcgggccgtaacccaggcgctggctgtaggcttcgataaagtgccgggtcagcggcaggatatcgccggggcgctcgcgcagcgggctgagttccaggctgaccacgtcgagacggtagtagaggtcttcgcggaagtgcccggcgttgatggccttctccaattgcacgttggtcgcggccaatacgcgcacatcaatcggaatgctcttgcgcgaacccaggcgtacgacttcgcgttcctgcaggacccgcagcagtttgacctggatcgccatgggcaaatcgccgatctcgtcaaggaacaaggtgccgccgtcggcctcctcgaaccagccggccttggcgctgagggcaccggtaaaggcgcctttctcatggccgaacagttcggcctccaccagcgactcggagaacgccccgcagttgaccgctacgaacggccggttgcgccgtgcgctgaggttgtggatgtggcgtgccaccagctctttaccggtcccggtctcgccgatgatcagcacgctggcttcgctgggcgccacttgctggatgtgatcgagcagtgcctgggatttcgggtcttcgaagacctgggccgtggcgcggatcgacgtcgcgagggcaggtgagggcggtagggtcaaaagctgcatgggcacctctcttaggaatagaacgtcggaatcggcaaggagtggttcaatgcccagtcccccagttcgtggagtttgtagtccaccgggtcgtgcagggtttgcgtgcgcaggttgcgccagtgacggtccaggcgcagtgacgcatgggtggagcgcgcaccggtgacttcgaacaggcggctgcacaattccaggccctgctgggtggcggcgaccttggcggtggcgatggcaatcgccagttggccgcgctcgtgctcgctgaggttcgggcctttggcccaggcttggtcgagcaggtcggcggcacgttctaccagcaggcgcacgccttccagggcgacccagaattcgccgtagtggtgcagcacgtatgggtcctggcgcacgtcttcggctgaggatttatgccaggcgcgggtttcggtcagcgtgtagttgcgggcttcttcgaaagcaccttcggcaatgccgagaaacatgtgcgtgaaggtcagttgggcaatcaacgggcgcaggcaggcgaagggcgtgctcagcgggcccggatcgagcagcagctcggattcttcgacgcgcacacgttcgaaactggcgctgccgctgtcggtctggcgctggccgatgttgttccagtcgttgtgcaaggtgatgccgctgcgcccgctggggatcgcggcgatcagcagtttgccaccggcggtttcgtccaccgccgaggcgatcagcatttccgagtcgctggcgccggagcagaagctctttttgccggagaactcgcgccagccgctgaaatccttgaccacggtgcgcgtgtccagcgggttgagggcgttgccccagaaccagtttttgcgcgcggtctgttcgaaccagggttgccattggtccgggcgcgaaaacaggcgcacggtggcgagcatcaggtggtgaaagccgaagacatgggcgatggaactgtcgaccttggcgaattcgcgcacgatacccagggtgtcgctccagcgtgcgccgaggccaccgtattgggggggaatgctcagggccagcaggccgctctggcgcagggcgtcgcgttcggccttgggcgtgccaccgcgctcgtcgcgttcgacggcggtgagggcgaattcggcggccagcagtctggcggtctgcaagggggacggcaggacgctgtggggtttggcggtcacacggtgttcctcattgatctcaagctttggtcggcaacacatcgttggcaatcatttcgccaaacggtccagtgaggttggtgatgccgtgcccggcaaggctggcgtagggctccggcagcaacgggaacaccagctcggcgaagcgataggcttcttccaggtgcgggtagccggagaaaatgaagctctcgatccccaggtccgcatattccttgatgcgttcggccacttgttgcgggttgcccaccaacgcggtgccggccccgccacgcaccaggccgacgccggcccacaggttgggggcgatttccaggttgtcgcggcgcccgtcgtgcagggcggccatgcggcgttggccttcggaatcaaagcgcgaaaaggatttttgcgcggcggcgatggtttcgtcgctgatgtgctcgatcaacgtgtcggcggctttccaggcgtcttcttcggtctcgcgcacgatcacatgcaggcggatgccgaacttcacggtgcgcccgtggcgggcagcgcgttcacgcacatccgcaagtttttccgcgacagccgcgggtggttcgccccaggtcaggtacacgtccacctgctcggcggcgaggtcgtgggcggcgtcggaagaaccaccgaagtacagcggcgggtaaggcttctgcaccggtgggtaaagcgccttggcgttctgtacgcgcaggtgtttgccttcgaaatccaccgattcgccctgcaacacgcgacgccagatgcgtaggaattcgtcggagacttcgtagcgctcggtgtggtcgaggaagctgccgtcaccacggttttcgtcggggtcgccgccggtcaccacgttgatcagcaggcggccattggacaggcgatcgagggtcgccgccatgcgcgccgagacagtcggcgaaatgatgcccgggcgaattgccaccaggtaacgcaggcgttcggtcagcggcaccagcgctgaggcgatgacccaggagtcttcgcacgagcgtccggtaggaatcagcacgccgtggtagcccaggctgtcagccgcctgggcgacttgtttcagataattgagggtgaccggccgcgcaccttgggtggtgcccaggtaatgaccgtcgccgtgtgtgggcagaaaccagaaaacatccatgaccaatccttaagcgattttcagcagagagggggagtgcgcggcaaacaaaggcgctgcgcgttctgccgccagttgaatacgggctttcagcaattcgctggttatctggtagtcggtgaagtcggcttcggtggcgtacacaccgatcggcagggtcagggcttggaagaagctgaacagcgggcgcagttgatgatcgaggaccagcgcgtggcgttcgctgccgccggttgccgccagaagcacgggtgtattgatcagcgcattgaggccgaccaggtcgaacagatgcttgagcagtcctgggtaggagccgcgatagaccggtgcggcgacgatcagcaaatcggcctgttcgatggccaacagttgcgcttcgacttctgccggcagttcatcacgggacagcgcaccacccagcggcctggcgatatcgcccagctcgatcagggtggcctggatcggcagcaaggtcgccaactcagccagcaccgcctgggtcaacaccagggtacgggacgggcgccaggttccgccggagagggcaacgacattcaggggacgggtcatgaacagttcctttttcaacagtggttcatagcaggtggagtgcaaccgcttgagcaagagctgtaccaacgggtgcaggccttgattgacgtgggttgcaggctcactgctgaaaaatgccggtgttggctgcctggtgatttgttgattggctgttgccagggcaacagttgcgtgggcaacagtgccagggcggtgtagcacccgttatagagggttgtatttattccgtaaatgaacgtatttccatatttatagatcataaagaaatataaaaggcactgctatcgaaggtgccttggcggttgatagcaactatcaaggcaggtgatttttcaccgtgaaagggcgggagtagcctgtcttcattgactcgaaacctcctttgcagggccaccgccatgaaccgattcctcgctgtttccttattgattgtcagctcagtccttgccggatgtgcgacccatccttcgcctgaattgcgtccctacaccgcggaagaaaccaaacagttggccctggaggcattgagccgtcgtggtttgtcgtttgacgaatatcaacagcagcgtgccgcactgaccggccagccacagaaacccttcggatttgatcgccagggcgaaatgaacgccgaacgcagcgtgaccctgcatggtcgtcccagttgaatccgcgctcagcggcaaaaaagcccgaggttatccacaaggatcctcgggctttttgttttccatggggcgacttcagcctgttaagctgaatttcaggagcgttcctacgcacatttacataaagtggtccttctttaatggcatgtgatcggttaaacctgacgacctctgtcccggtccgtgcccctgagacgctgctctcgggaacctgctctgcgagtttctaacgtcatgaataaacgtccgttgtatttcgactacgccgccaccaccccggtggatgagcgggtcatccaggtgatggtcgagtgtctgggcttcaatgccaatttcggtaaccctgcgtccagttcccacgcgttcggccaggcggcccggcaaacggttgaacagtcgcgtcgccaggtggccgaactggtcggtgccaaccccgaacaaatcgtctggacctccggtgccaccgagtccaacaaccttgcgatcaagggcgtggcccaggcgcggggcgtggcgggtgggcatatcatcaccagccagatcgaacacaaggccaccctggataccgcgcgacaattgcaggaagccggtgtggccgtgacctacctggtgccggacgccgatggcttgatcagcgccgaggccgtcagcgaagccttgcgtgaggacaccttcctggtgtcgctgatgctggtgaacaacgaactgggcaccctcaacgatatccccgccatcggtgcccgcgtgcgtgaacacggcgcgttgttgcatgtggatgcggcgcagggtgcgggtaaggtggcgatcgatctggcgcagtggccggtggatctgatgtcgttttccgcgcacaaactgtatggccccaaaggtatcggcgcgttgtatgtcgggccacgggcgcagcagaaagtcctggcgcagattcacggcggcggccacgaaggtggcttgcgttccggcaccctggcgacccatcagattgccggcatgggcaccgcgttcgccttggcggcggcgtctttcgctgaagaaaaggcggtgatcgtggctctgcgccagcgcctgcttgaccagttggattcggtggctggtgtgcgcctcaatggcagcgctacacagcgtattccacataccctgagcctcacgttcagtgaaggcgaattcaacgccgctgcgttgagtgcagggatcgcgttttctgcgacctcggcctgcaattcggccagcaatgcaccgtcccatgtgctgctcgccctgggtcatgatgcacgcagcgccagccgcaccatccgcttgagcctcggccggtttaccaccgagcaggatatcgaccaggcggtacaactgatcaaggcggccctcgccagtgcaccggcgttctgggcggtctgattcatctatcgcaacacataataattattcgtggttagcaggagacacaatgagtacgcagcccttgacccatggaacggttccccagcgcctggcgcatacccgtgaactgatgagccgcgagggcattcacgccctgctggtgccgtcggccgacccgcacttgtccgagtacttgccgggttactggcaggggcggcagtggctgtcggggtttcatggctcggtgggaacgctgattgtcactgcggatttcgccggtgtgtgggccgatagccgttactgggaacaggcgaccaaggaactcaagggcagcggcatcgaattggtgaagctgcagccgggccaacccggcccgctggagtggctggccgagcaaacgccggaaggtggcgtggtggcggtggatggtgcggtcatggccgtggcttcggcgcgtaccctgggcggtaagttggcggagcgcggcgcgagcttgcgtaccgatatcgacctgctcgatgaagtctggcaagaccgtccggcattgccgaaccagccgatctatcaacacctgccaccgcaggctactgtcagccgtactgaaaaactcgcttctctgcgtgctgccttgaaagagaagggcgccgactggcatttcattgcgaccctggatgacattgcctggctgttcaacctgcgtggtggtgacgtttcgttcaacccggtgtttgtgtcctttgcgttgatcgatcaacaacaggccacgctgtttgtggcgctgagcaaagtcgacgccgaattgcgggctgtgctggggcaggatggcgtgaccctgcgcgactacagcgaggttgcggatgcattgcgcgcggtgccggcgggcgccagtttgcaggtcgacccggcgcgcgttaccgcgggtttgctggagaatctcgatgccggcgtcaagctggtcgaaggcctcaacccgaccacattggccaagtcccgcaagagcctggccgacgcggaacatatccgtcaagccatggaacaggatggcgcagcgctgtgtgaattcttcgcgtggctggacagtgcgctgggccgtgaacgcatcaccgaattgaccatcgacgaacacttgaccgctgcgcgtacccgccgccctggttatgtgtcgttgagtttcaacaccattgcggcctacaacgccaatggcgcgatgccgcattaccacgccactgaagaagaacacgcattgatcgaaggcgatggcctgctgctgatcgattcgggtggccaatacctgggcggcactacggacattacgcggatggtgccgatcggcacgccgagtgacgagcagaagcgggactgcacccgggtgctcaagggcgtgattgccttgtcccgtgcccactttccgaaagggatcctgtcgccgctgctggatgcgattgcccgcgcgccgatctgggcggaaggcgtggactacggccacggtactggccacggtgtaggctatttcctcaacgtgcatgagggcccacaagtgattgcctaccaggcggctaccgcgccgcaaacggcgatgcaagcggggatgatcacctccattgaaccgggtacttaccgtccaggccgttggggcgtgcgtatcgagaacctggtgttgaaccgcgaagcgggcaagaccgagttcggtgagtttctcaagttcgaaaccctgaccttgtgcccgatcgacacgcgctgcctgttgccatcgttgctcacggcagacgagcgtgagtggttcaacgcttaccacactgaggtgcgcaagcgtttgagcccattgctcagcggtgccgcgctggagtggttgcaggtacgcactgcggctatctgattacctgccaggcagtaacgtgccagggcgttttggccatcaagctctaactcaacgcttcgcgcacaaattccagacggtcctgaccgaagaacagctggttgcctacaaacatactgggggcaccgaacacgccgcgttgaacggcctgttcggtgttgtccttcagggcagtcttaacggtttcgtcattggccaaattcaggatttcattggcggcaaatccgtattcagtgagtacggcagccaggacggcggggtctcccaggtgacggccttcgacccaaaaggcatggaacaggcaatcaacgaagtccaggaaacgttcaggctggtgtaattggatgccggtgaccgctcgcatcaacaccagcgtattgatggggaagtgcgtgttgaaccggagcggtacgttgtagcgccgggcgtaacgcgccaggtcatcaagcatgtagcgaccctttgcaggaacggtgattggagaggcgttaccggtggccttgaacacgccgcccaataacatgggtttatacacaagctgtgtatcggttgccgtgcacaatgccggtagctgggtgtaggccaggtaggtggcggggctgcccaggtcaaagaagaattccagggttttactcatggtcgatgctcgctgcttattgttataggggcgtgcttaccagggttcattccaggggcgcaggtccagttcaaaggtccaggcatcgcgtggctggctgtggaggtgccaatagttatcggcgatatgctcagggttgaggatgccgtcctggtccttgagtgcgtatttctgcgggaagttgtcgcgaatgaagtcagtgtcaatggcgccatcgaccacgacatgggcgacatggatgttcctgggccccagctcccgcgccatgctttgcgcgagcgcccgaatgccgtgcttggccccggcgaatgcagcaaaacctgcgccgccgcgcaaccctgcggtggcgcccgtgaacaggatggtgcctcgattacgcgtgaccatccgccttgccacttcgcgtgcatttaggaagccggagaagcaggccatttcccagatcttgaaatacttgagcgcagtttcttccaggatgctgcacggcacattggcgccgatattgaatacaaaggcttcgatcgggcccagctcggtttcgatctgttcgatcagcgcgatgacgtcttcttctttacgcgcatcgcaggcaaacccatgggcttcaccgccagcggcgtgaatactctcgataaggggctgcaacttatcggcgctgcggcgggtgacacaggccacgtagccttcgcgggcaaagcgtttggcaatggcgccgccggttgcatcacccgcgcccactactaatacgatttttttgttgtgcgtcatgggacctccctcggctcgatgatcgagcaagagtttagacgccgtgtggtgaagggtagggtttgtatctggatttaataggagcagtcagagatgactgctcaggcgattacttgcagataacgatcatgctgcggctggtgtagccggcagggttgaggccgaaggggtagtccccaggctcctcggagttgtcaccggactttgcgattactcggtagcccttggcgccacaggcgttggtcgcactggtgtagcactgctcccaggaagaggacaagccggaacagttgatatgcagcccttttttgccacgtttcacttctgtcttggtggtcgcggcacaaccagcaacggccatgaccattaacagtatcaaaattcgcttcattcctatccttaatagccgccttgcaatgccagaggccggctctactcgctctcgggtgtagcgttcgcgctgtccttgtcgaagttctccatgattgacattcgtttgcggcctaaacatggcctaaatgtgcggtaaataccagagctacattcaaacagacttcaatccgaggcaaccaaaggctttggctcactgcgcatcgtcaccgtggcacctacggaggccagaatgatgcaagtgattgccagccactgagcgagcgataagtgctcgtgcaggaataacaggccggagagcgcgccgaaagccggctcgatgctcatgagggtgccgaaggtgcgggcggggaggcgcgtcagtgcgaccatttccagggtgtaaggcagggcggtggacagaatggcgacgccgatggcgatcgggattagcgcgggagtcagcaatgcgctaccagcatggacgatgccaataggcgcaacaaacaatgcggcgatcatcaccccaagggcggcggtttggaccccgttgtcattccctgctttctggccatatagaatgtagagcgcccagcacacgcctgctcccagcgcgtaggctgcccccagcaagtcgataccgccgctggcctcgcccatcgggatcaacaagagaaggccgatgatggcgagggcaatccacaggaagtcgaccgcgcgccgagaggcgtagatggccaccgcgagggggccggtgaactccagggcgaccgcaatccccaggggcacgctgcgcaatgacatatagaagagaaagttcatgccacccaacgccatcccgtagacgatgacggtgcgtaaggacttggaggtcaggttggcgcgccacgggcgtaacagcagcagcatgatcacgctggcgaaaatcaagcgcagggttgtggtgccttgtgcgccaacgatagggaacatgctcttggccagcgaggcgccggactggatggaggccatggcgatcaacagcaggccgacagggaacagtgtcgaggccaggctgcggggggaggtggtcattggggtattcgtccgaagtcatatatagagaagcaagggcgctatgatgctcaactgtttagtgttgagcaatatattgctcaactatcctttttaatgcgtcatacagggcgaattttgagcgtttccggttctttgatagaaaaagcaaattaagggttgacggcagattctggaagtctataattcgccccacttccggcgcagtcgaaacggaaaactccttggtaaacaaagagttacgcagaattcgacagcgacttgcttc

SEQ ID NO: 33 - DNA, 86380 bp, Pseudomonas nodulensis
  misc_feature (31428)..(31503): n is a, c, g, or t
accatagagcattggaaccacctgatcccatcccgaactcagtagtgaaacgatgcatcgccgatggtagtgtggggtttccccatgtgagagtaggtcatcgtcaagattaaattccagaacccctgattgctaacgcaatcaggggttttgttttgggcggtcgaaaactcaagcgctgctcatcctcgataaataccgtaccgttggggaaatcgatgcaaagtgtttctgcatttttggtatggtgcagcacattttcacagggattgatttttcacccgcaggacgcggcgtcgaccttcttcaacgagatgctgtagaaatgcctgaaccgatacccatcaaagatcacgaaaaagaaaaccgcctggtcaacaagcgcctgctcgcctgtgcgctgctggtgattggcatttcctgcgccctggtggggcgcatgtacttcctgcaggtcgtgcagttcgactatcactccacgatttccgaaaacaaccgcgtccacgtattacccatcacgccgacgcgtgggctgatctacgatcgcaatggcgtcgtgttggccgacaaccggcctagctataacctgaccatcacccgagagcgcaccaccgacctcaagggggagctggacgccatcgtcagtttgctgcatctgcccgccgaggatcgcgcggtgttcgacaaggcgctgaagcaggcacgccacccctttgtccctgtgacattgttttacgagctgaccgaagagcagatcgcgctgctggcggtgaacgagttccgtctgccaggggttgatgtagaacctcagttcgttcgccactatcccctgggcgcccactttgcgcactccatcggttacgtgggacggatcaacgagaaagaatccaaagccctcgattcggttgagtaccgcggcactcagtccatcggcaaaaccggcatcgagcgcttctacgagtccgagctgcatggtcacgtaggttatgaagaggtcgagaccaacgcccagggccgtgtgctgcgtgtgctcaagcacaccgatccgatccctggaaaaaacatcgtactgagcctcgacgtccaccttcaggaggcggcggaagaagccttgggcgatcgccgtggctcggtggttgccctcgacccacaaaccggcgaagtgctggccatggtcagcaaaccgagtttcgaccctaacttgttcgtcaccgggatcagcttcaaggaatatgccgcgctgcatgactccatcgaccggccactgttcaaccgcgtcctgcgcgggctctatgcgccgggctcgaccatcaaaccggaagtcgccatcgccggcctcgacagtggtgtcgtcactgcacaaacccgtgtgttcgatcccggttactaccaactgccggatttcgaccacaaataccgcaactggaaccacagcggcgacggctgggtcgacatggacgccgccatcatgcgctccaacgacacctacttttatgacctggcccacaagctgggcatcgatcgcctgcacgactacctggctgaatttggcctgggccagaaagtgtcgctggacatgtttgaagagtcagccggcttgatgccttcccaggcctggaagcgcgccactcgccgccaaccctggttcccaggcgagaccgtgatcctcggcatcggccagggctacatgcaggtcacaccgctgcaactggcccaagccaccgccctgatcgccaacaaaggcgtgtggaaccgaccccgcttggccaagaccattaacggcgtgccaccggtggatgaaaaccctatgcccaatgtggtcctcaaggacccacgtgattgggagcaggtcaaccatggcatgcaattggtgatgcacgacccacgcggcatcgcccgcgctgccgcacaaggcgcgcaataccgcatcgctggcaagagtggtaccgcacaggtggtcgcgatcaagcagggcgagcgttataaccgtgaaaagaccctggagcgccaccgcgacaacgcgttgttcgtcggctttgcgccggccgaacacccgaaaatcgtgatttcggtgatgatcgaaaacggtgaagccggcggccgggttgctgggccggtcgtgcgccagatcatggacgcctggttgctcgaccaggaaggtcacttgaagccgcaatatgcgacgcccgccaaagcacctggagacccgaaggtttaatcaggctttccactcgtcccattgctctacgccttcataggcaagccagggcacatcatgggccgtccagatgtgcgtggtgggcctgacgcccggatcatcatccagcgtcgctacccgcacgatgacgtgcggttgatgcccacgttctgccatcaggtgtgagccgcaacgcgaacagaaatgcctgagcttgcccggcgacgattcgaaagacgccagcagctccacgccctgggtccagcgaaagtgttcgcgcatcacgccggctgtcgcgacaaatgccgctgcatgcaccttgcggcagctctcgcagtggcagtggctgatcggcatgtccagacgcctcacctggtaccgcacgcccttgcagaagcaacttccattcaatgggtcagtcataacgtaattgccggtaaggaaggggccatcatcattgcttacaatcctaggttgcgcattggtcgatgtcgcctactgtcaatggaggaggtgacttatgcatgtattggatcgaatcgaacggaaagtcctgctcaacgcttcacgtagacaggtgtgggaagccctcactgatgccgagcaattcggccattggtttggtatcgccctcgaaggcaaagcctttgttgccgggcaagccatcgaggcacctatcacctatccgggttatgaacatgtgatctggaaggccaggatcgaacgcattctgccgcaaacgctgttctctttttggtggcaccccttcgcggtcgaggcgggcgtcgactacgaccaggaaaccccgacactggtggagtttaccgttgaagaccgtgcaccgggcattctgctgcgggtggtcgagtccggctttgacgcggtgcccgaagcacgtcggcaaaaggccttcaagatgaactcacgcgggtgggacgagcaaatgggcaacatcgaaaactacctgagccaggcccgacaggcttgaccccagcgggcaccatgcgtgatgcccgcctctttgcaccgtacttagctttcgtgatcggtggtgatctccaaggtgtcggtaaaggttaccaggacactctgcccgactttcaggtctttgaggccggcgcgaatctccggtttctccacattcaacaccttcgtcgcaccggcagggttctccagggtgacctggtttttcttcaggtcgatatgggtgatcttcagttgcacctgcacctggcggaaagctgcaccgcctgggttgggattgtcggcggtggcgcggatcacgccggttttttcgctggcatccggtgggctcttgtccacatcggtgtccagcaccgccgcaaccgagtgagtggtcagcaccttgacctggtcaccgaccttgaggttgcccaggtccttggcggcatcggtaagttgcacatgcacttcacgcccctcggcaccggccagcaccacctgatgtttggccgcatcgacggccaatacttttgtagtaacttcatcggcttccagggatttggacagcgggatatcggcggcgtgagcgatcaggttgccggcggacagaagggtggccagggcaatcgcctggcgcagggaacgggatagcttcattgaagggacttccatgtgagaggagccctgagtctagtggtgagtcagcgatgcgcaaattcgctgactcaccttggtgtaacgcgtttagaagtccacagtcgccgagaacttggcaatacgtgggtcgccctggctcaggaaaccgccctgggccgattcccagtacttcgcgttggcgacgttctccacggtggcgccgagggtgacatcacgctgggccaccttgaagttgtagcgcgcgcccacgtcgaagcggttccacgtcggcaagctcaagttgttggcggcgtcggcgtactgcccgcctgtgcgcaaccagcggccattgagggttacgccttgcaggccaggtacatcccactccacatcggcgttgagctggaacgaaggtacgccgattgcgcggttaccgtcattggcgccgttttgcgtgtccttgagttcggtcttcatcaccgtcacaccgcccagcaaacgtaggccgctgaggggttcgccgaagacgttcagttctacgcctttgttgatttgctggccttcacgcacatagcgcgctgtagtcgcatcgatgacctgaacgtagccggcgccaggctgttcgatacggtatacacccagcgttgcgccataggtgcccatgtccactttcacacccgcttcgatttgtttggagcgagcaggcgcaaacgcctggccgccgccgatgatcgtccggttgcccgagttgaccggcgacgtcgggccttgcgccaggccttcgatgcggttggcgtagaaagacacgtgttgccacggtttgaacaccaggccgtagactggcgtggtaattgactcgtcatagttggaagtgcgcgtaccgctcatgtagttgtaagcctgtaccaccatctgctggcggcgcgcgcccaacgtgaccaacagacggtcatcgaaaaagcccagggtgtcggacaccgctgcgctgcgcacgaatgttttgcctgtaatggtcgggtcgctgaaatcagtgcctggcgtattgcgcgggttgttcagggtgggcggagcgccggtcacagggtcgtagatgttggttcgggtagccgtcgacgaggcgttgaacacataggcattgcgtgcttgagtccagataccggccaggccaaagttgagtcgatggctcaaagggccggtctggaaactgccgttcaacccgcccattaagctgcggttgtcttcttcgtgggcgatggtcgagcggcttgccagggcattaccgctgttgtcagtcagcgtgaccgacgagtagcgccccatttcccgggtgtgcttggcaccgcctgctgcataggccgtccagttgtcgttcaggtcatactcggcgcgcagcatgcccaaggtgtcttcgaggttggtgctgctccagctcggcgcgtagttggtgtcggccgaaggcgcatccggcacatgggtggccgtgcccaggaataccgagttacgcccgccattgatgtgctgcttctgatacacaaaatcactggacaggcgcaacgcatcaccgcggtagtccaggcccacggtgaacagcttcgagcgctgattttcatcatcgatgccggtatcgccttcgcgctgggacaggttcacgcgtgcaccaaactggttgtcctcgccgaagcgctggccaatatccagatgctcgcccacccggccatcgctgctgatatcggtactgaagcgacgcagtggcaggtcatcggcgcgcttgggttgcaggttcacaccgccgccaatccccgagccggtcggtgtcacaccattgatgaaagcattcggccccttgaacacttccacacgctccagggcgtcggtggacataatctgacgcggcaggatgccgtacaggccgttgaaggacatgtcgtcaccggcgagcggcaggcctcggatcatgaacgtctgtgcctggttggcatagccagacgcctggcgcaccgacgaatcattaagcagtacatcgccgatcgtttcggcctgccggtcgcgaatcaatttctcggtataggaggacatgctgaacggcacgtccatgatgtcctggttacccagcacccccaactgagcgccacgtgccacctggccgccagcgtataccgggggcagggcgcctggcgcaggggcgtcggcgctgatagtggtggcgcccagttccagcgtgccggtttcctggctagcgtgagccgagaggctcagggaacagcacagggcgagcagggtggggcgatacggcacagcgaatgggatacgggcgggcatggtcgatcctgacggtgaaccgtcaatggtgagggaaagggcaacgatggttgcgcttcctcactgcgcggatacaactccggtgcaaatgatagtaattattattaacgtcgtgcaacaattttgtgagattaaggtctgcgcgcatcgatgccgagtagaatcacgccctgaaagcgattcctgaggtgcggtacggtggatttacagcagggttttgtcctgacccggcattggcgcgataccccggcgggcacggaggtcagtttctggctggccaccgaccagggcccgaagtttatccggctacccgtgcagacctcggtgatgttcatccccgaagcccatcgcaagcctctggattggctgctcaagggcgagcgcgatatcgaactgcgcccgttgcagttgtgcgatttccatcaccgcccggtcctgggtctgtacacccgccagcaccgccaagccatggacgtagaaaaacgcctgcgcgctgcgggcgtcgacgtgtacgagggcgatgtgcggccacccgagcgctacatgatggagcgcttcatcaccgcgccggtgtggttcggcggcacccccgacgctaccggcgcactctgcgatgcgcagatgaaacccgcgcccgactaccgcccaccgctgaagctggtgtccctcgacatcgagaccaccgcccagggcgatctctactccatcgcccttgaaggctgcggcgaacgccaggtgtacatgctcggcccgccgaacaaaaccgatgcggtcgacttcaaactcgactactgctacacccgcgcgcaactgctcgaacgcctcaacgcatggctcgccgagcacgaccccgacgcgatcatcggctggaacctggtgcaattcgacctgcgcgtgctacacgaacatgcccagcgcctcaacgtgccgctgatgctcgggcgtggcgacgagccgatggcctggcgcgaacacggcagccgcaaccactacttcgcggcggcagcgggacgcttgatcattgatggcatcgaagccctgcgctcggccacctggagcttcgagtccttcagcctggaaaacgtcgcgcaaaccctgctcggcgaaggcaaggacatctccacgccgtaccagcgcatggacgaaatcaaccgcatgttcgccgaggacaaacccgccctggcgcgttacaacctcaaggactgcgagctggtcacgcggattttcgccaagaccgaactgctcaagttcctgctggaacgcgccagcgtcaccggcttgccggccgaccgcaacggcggttccgtcgccgcgttcacccatttgtacctgccgttgatgcaccgccagggctttgtcgcgccgaacctgggcgacaaactaccccaggccagcccgggcggttttgtcatggactcacggcccggcctctacgaatcggtgttggtgcttgattacaaaagcctctacccctcgatcatccgcagcttcctgatcgacccggtcggcctgatcgaaggcctcaagcaccctgacgacagcgcatcggtggaaggctttcgcggcgcgcggttttcccgcacccgacactgcttgccttccatcgtcgcccgggtctctgaagggcgcgaagtggccaagcgtgaacacaacgcgccgctgtcccaggcgttgaaaatcatcatgaacgccttctacggtgtgctcggctccagcggttgccggttcttcgatacacggctggcgtcgtcgatcaccctgcgtggccaccagatcatgcgccagacccgccaactggtcgaagcccaaggctacgaggtgatctacggtgacaccgactccaccttcgtctggctcggcaaggcgcatagccaagcggatgccgggcgcatcggccaggcgttggtccagcacgtcaacgactggtggcgcgagcacctgcacactgagttcggcctgcaaagcgccctggagctgcaatacgaaacccatttcacgcgcttcctcatgccgaccattcgtggcgcggaggagggcagcaaaaagcgctacgccggcctggtggtgcgcagcgatggcagcgaggacatggtctacaagggcctggaaaccgtgcgcagcgactggtcgcccctggcccgccgtttccagcaggaactctaccagcgcatcttccatcgccagccgcaccaggactacattcgcgactacgtgcgccgcaccctgagcggtgagttcgatgagttgctgatctaccgcaaacgcctgcgtcgccggttggacgactacgaacgtaacgtgccgccccatgtgcgcgccgcgcgcctggccgatgagtacaacgaccgcctgaaccgcccgtgccagtaccagcgcggcggctggatcagctacgtgatcagcgtcaacggccccgagccgttggaggtgcgacaagcgcccatcgattacgatcactacgtcacccggcaattacagccggtggccgatgccatcctgccgtttgtgaatgatgatttcagcaccttggtcggcgggcaaatgggtctgttttaaaacgcttgattcgtccgtgtgcgagcctgcactcttggtcactgacgaccaccctgacggcgcagtccccatgaccgaatttaccctgaccggcaccacggtcgaactcttgcccctgcaacgggcacacaaggccgccttgctcgaggccgccgccgatggcgaattgtggaacctcaaggtcaccaacgtgccgggcccggatacggtcgacaagtacatcgacaccgccctggccgggcgcgatgccggtagcgtgatcccgttcaccctggtgcgccgagacaccggccaggtggtcggtagcacacggttctggaaggtcgaccgggtcaatcgcaaactggaaatcggccatacctggttggcgctgtccacccagaaaagcgccatcaacactgaagccaaactattgctgctgacctatgcgttcgaagtgctcgactgcgtgcgggtgcaattcaccaccgatgaactcaacgaaaagtcccgcgccgcgatcctgcgccttggcgccgtgcaggaaggcatcgtgcgtcacgaacgcatcatgcccgacgggcgcaagcgcaactcggtgcgcttcagcatcatcgattcggaatggccgcaggtaaaagccaacctgcaggccaaactgcaacgctagaagggaaggcccatgtacatgctctacggcatcgacgaatccggctcctgcatgatcgaaatcgccctgcagcgctgtgcggtgccgtggcgccgggtcgacgcagcttcctgggcagagggcgagggcagtgacgagctggcccgcatcaacccgctcaaacaggtgcccaccctggtgaccccggacggccagttgctgacggaaagcgcagcgatcctgatccacctgggcctggaatttcctgcctcccacctgttggccggcaaccgcgcgcagatcattcgcggcctggtgtatatcgccgccaattgttactcggcgatcggcatcattgactacccgcaacgctggctcggcaacgtcaatgaaaccgtgcaggcgcagcttgtcacgggtacccgacgttatctgcaccaggcctgggtgctctttgccgaccagtttgccgagcaattgtttgcgccggacaacaccccgaatgcactgggcctgatggcggccgccgtgtcgcgctgggacgaagcacgggacgcgttgaacggcctggcgccaggctttgcccagagcctggcgcaggtggatgccgaccccatcgtcgcgcccgtatttgctcggcattggccgcagtggaaggtctcatgatgtttccgcaatcagtggaaacaatgacagccgcagcctccaaacccttgcgtagcgggcgtcctgacctacgctttcttaaagtgatgtaggaatcatccttgaatttgactgtcgcagacatgaaactcaagaaccctgcatggaattcaaaggaggtgcgcatgctcatccggtcgctgaccctggctaccttgatggcttttacggggccgctgttggctgctgatgatatcaacccgctcaagcaggacttgggcaaggcccgaccgctggtggtggtggagcttgattccggcaacgccacgttggccgagctgaagaaacagctggacgagcctgcgaccaagcagtcctttgaagaacgcagcatggtgttctacaccgtgaagttcggcagcatcggtgccgaaggcgagaagttcgccaaggaccccaaggacagcaagaaactcaccccgccggaaaccaacgcgctgatccgtgccctcaagctgggcgccggcagcggcaccaaagtgatcctggtgggcaaggacggtgagaagaaactcgagaagactgtaccgccggataccctcgacctgaaggcgttcttcagcgccatcgaccagatgccgatggccgagaaagaagccgccgccgctccggagcctgaacccgcggccccggcaccagccaagggtgccaaacctgccaaacatggcagcaagcccgcaccgcaacagctggatgactgaacccaagaccctgtaggcgtgagtgcctacagggttttttgtggtttgcgcaccggaaacggaaagtagaaaaaccgcaaaaacgccacccgcttgatcacttccccgatcaacaacggcaccaccactgccaccacaaaacccatgcaggccgcgacaaacgcgtgcagccccaggcgctccagcaggtcaaccgtcttgtgctggatctcgccgtggaagatcagcaggatcaacgtgttctggccaatgtaggtcatcgcccgtgtgataacggtcgacaccatcagcacccgcgccagtgaccagcacgcgtacaagccgatcaccgccagcaggctggtccacaaccagtggtcgtagcggcgctgcgccaggtccatggtggaatggctgtagaggaacaccgcggcaaacaaggacaacgaaatcaccagcgcgagcaatgatccctcgtgccgcctcagccagtcgcgcagcaggtagccgcagatgaagtaagtgctgctgatcagggtgatttccaggccgaagggcaggccgggcagtatccaggtgtgcccgccgacggtcaccggtatttgccagaaccacggcagcacccagatgccgatcaacagttgcacggccatcagcaggcaactcaccggcagagacagcttcaggcgctggatcaggcgcaacatgacccaactgaacaggatggcgacccagaagtgcggcagaaaccacagcgcctgccaggggatggtatccaccgaggcgtacaacacgccgccgacatccggcagcagaggttggccgcgcagtatgtcgcgcaccagtacgtacaccagcatggtgaagaaaaacggcttgagcaggccatcggccttgcgcacggccatctccacaaacggctgttcgggtttgaagaacaccccggagaggaaaaaaaacaacggcaggatgaacgaggcgatgatcgggtactgcaactccagcgagttcgccacgaaccaactgtggccatacacgatcatcaggatgccgatgcccttggcaatgtccatttgaatccagcgatgcttcacctgaccaccctccctctaaaaaccgcacccacagaaaacctcacgccttgcgccacggcctcagccacagccccatccccagcaacaccgccgcgccggccagggtgctcagccccagttgcagccacacgccttcaacccgaaacagcgccaacgccgccacgcccatcagcaccgcgctgagcagccagctccgagcccagggcagggcgccgagcaatgcctggcgctgcatcagcagcaacgcggtgcagagcactccggccagcgcagccagcggaatcccggccaggccgaacacaaacggcagcacgcccagcaacgccacattcaccaggctgccgagcagttcacaccgcaatggctggcgcgtatcgcccgcagcgtaggcatagcgtgcgagcaaggcgttccaggcgccgaacaccaacggcacggcaaaccaggccagcagcagcggcaacggcgagtccagcgattgtttgggcagcagcaacgccaccaggctcggcgccgccgccaccaggccgaccccggcgggcagggtcagcacgctggcggtttccaggccacgcttgagcagggccaggcgctcatcgccctggcgccgactcatcatgcccagcaacacctggttgaggctcatcagcgcaatcagcggcaggttcatcagcttgcgcgccaggttgacccaggtcaccgcaccttcccccagcaaggacgccaccagccgttcgatcaaggccaggccctggctggcgccgttgctcaacagcagcgggccgatgcgctggcccaactcccgcaggggcgcccacgaccgctgccaatgccacggtcgccagccctggcgccacatcgacggcagcaacgccaacggcatcaacaggctgccggccaggcaggccagggccaatgagtgaggttcagtggcagtgccggcgaaggcgaggtaggtcaccggcggcaggttgaacagtaacgagcccaggcccgccagtacaaagcgctcgctggcttgtaacggaatgctgaacagcgcatgcagaatcagccccggcacgcaccaggcgacaatctgcaagttgctgctggcgagcgccgtggcactggccgccaggcccggcccgagcagttgcaccagccacggcgccaacacggtcagcagcaggctggtggccagcgcgaccaacagcaacgccgggaacagtaccgcgagccagcccagccgctcgtcgtgcttgcgcgccaggtacagcggcagcgccgccgcactcagcacaccgccggccaacgacatgcgcagcgcctccggcaagaacagcgcgatcaggaacgcatcactgcgctcgccggcgccccaggctgccaccagcaaccattcgcgggcaaaacccaggcacaggcccagcagtgtcgccagcgtcagccatgcggcagagcccagcatcagcgctgtacgccgtcgagcagcgatttgcgcgacgttatgctttttacctgcggcaggcgcgccggaaacagacgccgcgcttccagcacattaatgcccaccatcagccagaacagcgcgaccatcaccacggcaaagctgaagtagtggtcaaacaggccgctgaccagcgccgagagaatcccggcggtggtgcccagccacagcgcgttgtccttggtcaggcggatcgggccgttttccggacgcgcttcacgccaccagcgtacggttaccgccacgaagaacagcatgccgacaatgccggtcttgtagatgaagttcagccacaggttggagatgcccagcaagtgcgtgtcgggtacgggcgggtcgaccttgaagccgataccgaacgggtacgccgccaccgcctgcggaaacatgcggtactcgtcgaaacgcacttcggtactggcattgctcgacgaaaaaatcgtcgccaggcgctcctgcaacggcggatacgcgatcaccagcgccaccgtcagcgccgcgccgatcatcagcaggcgcccggtgtacggcactcggcgcgtggccatccacagcagcaccaacgccaggctgaccatcgcgccacggctactggccagcagcaaggcggcggcgcccaggcacgccacgcccaggcccagcgcgcgtttccagccttgctcggtcatgccgaagcagaacgccaggggcagcagcaacgccatgatcccgccgatggcattcgggtgcatccacggcgagcccatgcgcgacgacatcgcctccaggccgaatttgagcatgtcgaagttgccgtagttgaacagcgccagcaccggtgcaatgccggccccggagcgtgtgcgcacgaacaccgcaatcgacagcaccagcatcgccaggctacccagcagcagggcgatcaccagggattcacggtgcttgcggtccaccagcaacttggcgcagaggaacaccgccgacaggctcagcaaccagcgcagccagttggccacgccgctggtgtcggcgtgaatggtgacctggccgacgatgaacgggaacacgctgaacagcatcagccacaacagcatctggtcggtggggcggcgggtgaggcttggcgtatccggcaggcgcgccaggaagttgtgccacagcaccgcgccccaggtcagcgccaggatcgcttcgctgacggtactgcgaatgcccaggttgattgtggaatacggcatgaatgtggcgaccagggcaaacagcaccaggccccagaatggaaaacgcaggatggtcaccgcaccggccacgccgatcacggcgaggaacgccttggccggcgacaacagcagggcgacggcaccaaacagcaggccgaagaggatggcgacgaggctgggcaggttcacgttcacttcagctcctcgatcagttcggccaggcgcccgcgataggcgcgatggttaaagcgttctgcccactgccggcattgttcgggcgattcatcggcggcccgctcgccgaggctgatcatcagctgcgtcagcgctggaccatcggtgggcgaaaagcgcggtgccgacggcggggtgatttcatccagcgacgtgccgctggccactgccaccgaggtgccgacgctcagggcttcgatcaccggcaggccaaaaccttcggcgtaagacggttgccacaggcgcgaagcctggcggtacagcgcatgcaattcggcatccgacacaccgctgagtgcacgaatcccaggcaggctgcgctgagcttcaggcaaatgatcgaggctgcctaccagcaccaactccggcacgctgggggactggcgccgcgcctgctgccaggcctccaccaggaacggcacgttcttgcgcagctcgcgggtgcccaccagcaaccaatagcgctcgggcaattggcgcgggccgaggtccgccgccagttcggtaaagccgtcgacctgattgggcagcacgcgaatcttgcccgcggccttgggaaacaaccgcgcggtttcatcggcgctgtactgcgacggcgtccacacccggtcggcgctgtgcaccgcgtaggtgatcgacaggcgatcgctggtcttatagatgagcgccttcaagcggttggcgtggtagttgttcaaggtgatctggaacaggtcatgcaacagcaccacggtgcgcaggcccttgggtttgggcggcaacggcaggcccatgttgaaggtgctgatgtacaggtcgatgtggtgctcgcgcaacgcccgtggcagaaacccggcttcgaagcgcaggcgattctgcggctggtgcatggcggtcttggcgcaaccccaggccgggcagtgcgcctgcaagcgggtttcatcgcccaggggcgccacggtaaaccgctcaagctcgatgccgggcagaccgcgcagggcgctttccagtgcatacacctggcggctgatgcccgattgcggcgaggtgccgacggtgcggtaatccaggcctacacgcatgcgggctccttttgattctggggcgaaagggtcgtgtagaccttttccagctggctggcggcgacgccccagtcatgggcacgacgcacataggcgcggccggcttcacccatggtcgtggcggcatcgggaaattgcagcaggcgcaccacggcatccgccaggctcgcagcggtctgcccgccgaggtaatccaggccttccaccaggtccaatcccgatacgccttgctcggtacttgccagcggcaagccggcggccaaggcttccagtaccttgagcttggagccgccgccatggcgcaacggcgccaggaacaccgagcagctcgattgcaggctcagcaggtcgggcacaaaaccctgccactcgatacgcgggtccggccagcgtgcccgccagctgtcgggcatgccgaagccgcacacgctcatgcgtacgtcggggcagcgttcccagacctggggcaggatctcatccagggcccactcgatggcatccacgttgggcgcgtattcgtagttgccgaggaacaacacgcggcgggtggttgggtcagggcgggcggcggcgaagtgatcgcagtccacgccgttgaccaccaccgacaccggtttgccggcgattttccccagtacctgtgcgtcgctgtcggttaccgcgatcacctgggcggcctgacgcatcacgcggcgttcccagcgggcatagcgccattgatcgtagcgaatgaacggcagcgaccagcccggcaaacggtcatacgtggcggcgccaagggccgattcaacgttgtgttccgtcagcacaaagggttgggacttgcgcgccagcacctcttcatacggctggaagctgtagctgtgttcgatttgcaccacgtcccaagggtcacccagcaaccaattgaaggtgtcctgcaattcacccgacaaaccattcacgctggccagcagcgggtagggcgcaaacagtccggccaacagggtcgtcacgctgcgcagagggcggcgcggcaggatgatcagttgttcgagaaacgcttccagcacctggcggtcggtaagcgacaccgggtgtttgtcatgcagcagcagggtgatccggtgcccgcgcgcggcgaggttgcgcagcagatggaactggcgcgtcttgccgccgctggtggcgggccagggtgaatagggcaggatccataaaatgcgcatggcaggcctcagtcccataacagaatttgcaggttcgacttgaccggtacggtcaggccgctggtgccgcttaccggggtttgtgtgccgcgcagcgggtcgtacagggtggcgctggccaggcctggcaagtgggcgttgccgccctgggcggcccagaagaaccacagcttgcgcccgtcggcgcgggtccaaccgatgctgaacaggccgtcgggcaactggtcggcaaccggcggatcgcccggcgtgagcgtcggcccactgacgtcgaggaagttcttcaaggcggtgtagacgggcttggggttggtgtcgatatccagcaagccgtaggagcggtcacgcacgctggcgcgctggtcgaggtcgctcagggtgaacaggaagatcttgtcgaaatccatcgcactcatcagtgccaggcggcggaccacgtagtcggcctgggcctggagggtgatgatgtcctgggcgtccttgggccccttgtaggttgaccagccccactcggtgctccacagcgtgttcacgccgccgttgcgcagggcctggttgagctgggtggtcttggcgatgaagtccaggttggccgggtcgttgccttcgggcaattgggtgtaggggtgataggaaatcacggtattgaggctggccacgccgagtgcgcccaaggcgtcgaacatggtctggccatcgggcatttcgctgaagaacgccatgccggcggccactaccggtttgctcgggttcacggcgcgcaaggcgttggtggtgacgctcaacagattcgcatacccggcagggtctgccgccgggcgccagaagccgatcaggttcggttcgttccagacttgccaggcctcgacgctggggtagcgctgggacagcatggccatgcgattggcgaacacgttggggtctttcggcgggtactggtccgggtacaacgacagcggcggggcgctgctgataaaacgcgccgaccccaccaggtaaaacaccgacttgatctggttctgctgcagcttgcccaccagctcatcgagggtggcgagcttgtattggttctgcgcggtttccagctgatcccaatgcaggtccaggcgcacccactccaggcccaaggccttgaggcggtcgatctgcttctggtagcgctcggggctgaaccacaggaactgcgcattcacccccaggaaatctttccagaccacctccttgctgcccttgagcacatggctttcggcatccgcctggcgtccccacaagaatgcggtcaggcccagggcggcgaccaccgcgagggtggcgaggtaggtgcgtttacgcgccataaggggctccgctgatggcctgctcgaagagctgcttgaatttctgcgcggtcaacggccacaaccgttcgcggccaatttccccggcgcgttcggcccaatcccgggccagcagcggtgtacgtgccagccgcagcagttgttcgccgagcgcggccacatcaccctcggggtagatcgcgccgttaccgctggcgacttcctcggcaaatgcgcgcgcgtcggaggtgatcgcgccgcgcccgcaggcggtggcccaggacagtgcgccactggtgccgcgctggcgtcccagcaggccgagttttttcgattcacggtagggcagcaccatcacgtggtgcgcctggatggtctgggcgatttcatccgccggcaggttcaggcgccagtcgatggcgtcggtcaggcccagcgcagcgatctgcgcatttaactgctccaggtaattgccgcctgcgccaaatgccatttccgcggcggtgccgccagccagagtcaggcgcacgcgatcgcgcaattcgggggcttgcttgaacacatccgccaaggcctgcaccaggtcttcgatgcctttgccccggtagataaacccgaagtacagcaggcgcagcgtgtcgagggtgggtaacggtaccgctgggatcggcaggttggcatggttgatcaccgcgactttgccggccggcagttgcatgcgctggctcaggcagtcggcacccaggcgggtgagggtcaccagccgggtcagtgccttggcgacctggcgttcttcacgcagggtcagtgggtcggccagcaccacggcggcctggggcaaggggctgggcagacgttccatcaggttcaaggggaacggcaggtgctcacggcgccacaccatgcgttccgggtcatgcacggtcgcggtcagcggcaaccgggggtaagccttgcgcagttcacgcaaggccaggaattcccccaggcgcccgccgcccagttcggcgtgtaccaggtcgacggcctgccagtcgaacgcgtcgatggcctgcttgatcgcttcgctgttgcccgccaccccggccaacggtgtcagcaccgtcacaccgaggtgttccaaggccgtgcggaaatggttcgcgtagtcggcgatcccgtttttctccggcggcaagggcgcgagcagggcgatccgcatcagaacgctccccggtacttgccgatggtgcgcagcactttgctcggcacttcaaacttgcgacggttgatgatgatgccgtccaccttgccgaacgcggtgttgaggatcgacagcgcatgctccaccaccggcacggtacttttgcgcgcttccaccaccagcccgatcaggtcggcgcgacgcaggtcgacgaacgcctcgcggttgtccagcaaggccgaagcatccagcagcaccacctcacccggcgcagcggtttccaggccgccgacgcgcacgttgatgccgttttcactgagcaattggcgcagttgctcgaccacaaaggtcaccccttcgccatggcgcgccgaggtcaggcccagggtcacgccctgttcggcaatgcgctcgggctgcagcaggctgtacagccggtagatgctcgcattgaacgcgttggtgctttgcgcggtggaggtgtccagctccggcagggtggtccacagcggcaggccgaacttgcgctccaccaggccaccgtcgtgaatacgctggtcgagcaggtagcacaggtagatcaccagcaggccgaccacgatggcgaacgggatcgccaacaccagcatcaccagggttttcgggaagatgcggcctgggttcagggtggcttcttcgatcacggcgatgttgctgatctggctgttgtccagctcacggtcgatgcgcgatttttccaggttatccacgtacagcgcgtagttgcgctcggtggtgttcagctcgcgggagaggcgggccagctccggttcgatctccagggcctgcttacgttgctcctccaggttcagcagttgtttctgctgttgcaccagttgggtacgcagtgccacgttgttgctggtttcatccagcaatacgcgctgcaagtggatttccagggtgttcggcgcacggttctccgaggcttgcaccgtgttgctctcgctgttgacctgcatctgcatggcccggatcgacgcgtccagggctttgaccggcggcgcgttgtcggtgtaggtgcgcatcatgtcggccttttccagcagcttctggttgagcaggcgacgcaagtcctgctgctgcgggttcagggcgatctggcgtacggtggtgacttccttgggctggcccttgagctgggtgcgcgtgctctggatcgcgctgtcggacgaggcgatcagtcgcgtcgtgttgaacgtctcaccgcgcagcacgttgatgcgctcggacaaatcctccaggcggtcggtgatgctcgccgcgccgatctcgttcaggtgcgtgaggatctgctccttgtagctcttgatctcggtggcgctgttggccacctggccttcatagaacgcgtacaggctcttgcgccccagagcctcggtacgttcgttgatgtaggtctcgacccaatccttgaccactgcctgggcgatttccgggtcgccccacttgaagctgatgtccatcaccgtggaaccggcggcgtggctgacttcgaagttcttctccaggctggcggccaggcgttccaccggcgtggttttttccacgacaccgacggtttccagcaccacgcgcaggccatcgaacaccgcgcccacgccgctcttggcgtagtacttggtgcgcttccagaaaccttccggcggcggcgcgttctcgatcacttccaggtagtgctcggccaccgcacgcacgatcggccggccggtgagcaggcgctcttcgtcgacaatcgggtcgcgctgggtactgggcatcaccagcgcctggcggttgctgatctcgataggcaaggtcgagtcacgccccggcttcaccaacaggcgcgcggtggactcgtacttggccggcagcaggaacgcccccagcaggatgatcaccagcgccgcaatcgccgccagtttgaactcatgccggaagatgaagaacaagcgcagaagatcacgaaaagaacggatctcgatcattgggatgtcgctcctttagttgttgccgccgctggttcgggtgtagttgtagccaaccccgatcgacttggtgaacgggatcagttggttcatgtaggtatccaccccttggatgcgctcgcccacgttggacttgggcacgaacaccacgtcgccgcgttgcaggcgcacgggtttgcgcccgttggggccggtcttgagcagttggctgaagtccaggaagtacgcgcgataggcaccctgggcgtcttcgcgcagcagggcgaccatgctggcgttgcccgccgggctgaccccgccggccccgatgatggcttgttccagggtgttggctgtggcgatctgcaccgccgtcgggttgttcaccgcgccgccgacgatgatcgagccgctcggtgcctggttgatgttcaccgtcacccgcggttcgcggtagatgggcgcgagcttgccggtcaactccgtggccagttccgacggctggcgaccggcgacctgcaccggccccaggaacgggtagttgatcttgccgtcggtctgcaccgtgtatagcgtcagctcatagatggtgctgacgttgaacgccgacagtgtcggcatctcgccggcatcgcgcacgatgcgcaactggtcgccgatgcggatgcgttccaccgccggcggcaattgcgccagctggtcgagggcgcgcttgccggcctcgacggtgtcactgtcgggcgggacgatgcgtgccggcgtgttgcaggcggccagggccatcatggccacgacgagcagggttcgtttcatcaagggggacttcctgtaggtcatgatgctcacctccaataaccgggaaacatgctgatgcgccgcttgagggcgagggggaggcgacgctccagttgacccagccggtagccgagcagtttgaacgcactgcgcaccagtacttcgggaacacggtgcagggcgccggccttgcgcaaggccgccagttcagccagcacgtagcgtttgccttcgccacctgcgtcgccaaaggcctgcttgatccatggctcgcggccgtagaacacgccgatgtcgaagtagcggtgaaactcatccatgagtttgtaatcgtgggagtgatgcaccaatgccgtggcggcatagcgcaccttgtagccatcgagcagcatgcgcgccgccacgtaggcgtcctcgctgccgatcacatcggccgggaaaccgcccaccgcctccagcacgctgcgccggtacacggaaaacgagtcggaactgaagcaggtcttgatccccagctccggcgcatcggccaggcttttgctgcggctgtgttcggggtagttgaagtgccgcgactgcgcacccagtactccggcatcggggtgcggcaactggcgaccgtaggccacgccgttgagcgggtcctgctgcaattcggcgagcaggttggcgaaggtttccggggtggcggggatcgcgtcctgggtcatcacgatcagcgcgtcgccgcccacctgttcgctggcccagcgccgggtgccgccgtggttgaagtcacgtgcgtcgatcacctcgacccgcgccccgaattcgcgaaagcgcgccgcggtgtcatcgttggaggcgctgtccaccaccagcatctcgtcaggttgcagggtttgcatcttcagcgccggcagtaggcggcccagatggctggaggcgttacgggtcgggatgatcagtgaggtgagcatgtcatttcttcacttctgcgggcgcgcgcccgtagatgtcgtcgaagcgcacaatgtcgtcctcgcccaggtactcgccgctctgcacctcgatcatcaccaggtcgatgatgccggggttggtcaggcggtgtttgtgcccggcggggatgtaggtggactcgttggcgttgatcaggaattcacgctcgccgttggtgatctgcgccgcaccgctgaccactacccagtgttcgctgcggtggtgatgcatctgcaacgacagcgacgcctgcggcttgaccacgatgcgcttgatcttgaagcggctgctttcctccagcacggtgtaggtgccccacggccgggtgacggtgcggtgcaggctgtacgccgggtggttctggcgcttgagctcggcgacgatgtagcgcacgtcctggctgcggtgggcgtcggcgatcagcagggcgtcaggggtgtcgacgatgatcaggtcgcgcacgcccacggcgccgagtacgcgcttgggcgagtcgatgtagcagttgtgcacgtcatgcagaatcgcttcgccattgacctggttgccatgggcgtcgctgggggtgagctggcgcagggcttcccacgagccgatgtcgctccagccgatgtcgcagggcaccacggcgacttgcctggacttttccatcagcgccacgtcgatcgacacatccggcgcactgccgaaggcgtccgcgtccagctcgcgctggcgtgaggtcttgttctgcaggtgctggctgtgctccagcgctgcgcgggcagcgtccagtacgtccggtgcatgggcggcgagttcgtccaccagggtgctggccttgaagcagaacatgccggcgttccacaggtgtttgccgccgtcgaggtagccttgggcggtggccaggtcgggcttttccacgaagcgcttgacccggtagccggtgcccagcgcctcgccctgttcgatgtagccaaagccggtttccggatgatccggctgaatgccgaaggtcaccaggtagccggcttcggccaggtcgcgggcctgggtcacggcctcggcgaacgccacttcattgaggatcagatggtcggcgggcatcaccagcaactgcgcgtcaccgccgaaatgttcctgcacatgcaacgccgccacggcaatcgccgccgccgtgttgcggccgaacggctccagcagcaggtccaggggcaggtgggcctggttgaccaggcggtagtcatccagggtgcggaacagcaggtcgcggttggtcactgtcaacacgctttccacgcccggcagcttggctgcgcgctggaaggttttctgcagcaggctctggccgtcgcgcatgcgcatgaacggcttgggcatgttctgccgggacaccggccacagccgcgtgcccgaaccaccggaaatgatgcagggaattaatccgttgagtgtgttcatcaatagacttccttggtggaaaggacggccgggaccgtcatgaagacgatgtacaggtcaaaccacaccgaccacttggagatgtactccaggtcgtactcgacccgtttctggatcttgaacagggtgtcggtctcaccccggtagccgttgatctgcgcccagccggtgatgcctggcttgacccggtgccgcgagctgtattcgctgaccgccacttcaaacggaatgcccgcggccttggtcgcggtggcatgcgggcgcgggccgaccatggacatgttgcccagcagcacgttgaacagttgcggcagctcgtcgatgctggtcttgcggatgatgcggcccacgcgggtgatgcgcgggtcttcgcgggtggtctggcgttcggcggtgaagtcgctctggtcgttgtacatcgagcggaacttgaacacgcggatttcgttgtcgttgtagccgtagcggttctggcgaaacagcaccgggcctttggaatcgagcttgatcgcaagcgccgtcgccagcatcaccggcgacaggcataccagcgccaggctggccagcagcaagtcctcgcagcgcttgatcaccggcgaccagccgcgcagcggcaactgcgaggtgttgaacatcaggatgccgcccacgtcggtaatcttgctgtggccgtagcgcagggcagccatgtccggcaccagcatcacgttcaccgacagctgccgcaggcggttgaccaaaccatggatgcgctgctcggcggcccagggcaggcagatcatcacttggttgacctgttcggcgcggatcagtttttccaggtcgcgggtgttgcccagcaggggcaggttgctcagttccttgggaatgcgctcggtgcggtcgtcgatgaacccgaccaggccggaacggatgtcaccgttgcgcagcaggtgatcggcgacgtgtacggcggtgtcggtaaagcccaggatcaccgtgcgttgcaggaatttgccggcacgcatcagcttgcgatacaggcgcagcatcagcaggcgctccaggcataacagccccaggctggcgacgtaccagaccgccaggttgcgcggggtcaattgcgggaagaactgcaggatctggtacatgaacagcaggatgcaaaaggctgccgtccaggccttgatcttggttttcaggcgcaggcgattactgaacagttcctcggaatagatgcccagcgcctggaacagaataatggtgaggaccgcaaaaaataccagcaggcccaggaagtgggcacgcagctcaggggccatcgggtcgaggaaaagcaccaggaccagcgggggcagaatggccgtcaggccatggaccaacttgacgaaaacaacaaagaactcaacaaaaccggcgcgcgttaagaacaggctgtcgacggacgacttctctcgcatacaaacatccctcattgcactccagccttcactgttcgacggtttgttcaataagcgctggcttgctttagaactagggtcgaacgactacgctgggtaatacgcaactagccattccaaatgcggctatccatttgactgggttttgcggggtagtgactaaaggagtgttcctttgatgtgtgttcagtcaacgaattgacagtggtgcggaggcggcatactagacaggttaatcagtcttttttgcggcattttattgacattccttgtccgaacactcggtgattgggtgtgtttttgagtgtaggaacaaatgtcagatttttcctgcttaaaggaaaaacctttttcaaagcgaggtaggaaagggggacaaagagggagcggcagggcgcactaagtgccctgccgccggggctttcatcggctcagaagttgcctttcaaactcacggtaaaattgcgcggttcaccgtagaagttaccccaggaggcggtaccgaccgtgttgtaataacttttatcgaacaagttgttgccgttgagcgccacggtccaggtgtcatcgaggcgatacgccacgcgcgcgttccaggtggcgtaaccggcctgttccagtttgatggtttgcacgcggtagttgctgctctgggcattgactccggcgcccacgctccatttcgacagtgcgccatcgagctggtagtcaccccacacgcgcagcatgtgtcgaggcacataggtgttggagacgccgccttcttttgtgctgtcaatggtgttcagggatttggtctgggtgtaggtgtagccgccgaacagttgcaggcgctcgagcacttcaccgctgatttcggcctccacgccttgggcgcggaccttgcctttatcggtgtagcaatagccatcggcagaggtcgggcagaagctgttgtagtcggtttcggcgccgtttttctcgatggcacggaacaatgccagggagctgttgaggcgcccatcgaaccattcgcccttgatacccagctcgtagttgtcgccgattttcggcttgagcgccgcgccatcggccgtggcatatgagctttgcggctggaagatatcggcgtagctggcgtacaccgagaggtgctcgttgaggtcgtagatcagtgcggcgaacggcgtgacctcgccggtttccttggtgtgcgcatcttgcagggaccactcgccccagcccaggttataggactcgcgccggttgtcgtaccagctcacgcgactgccgacgatgaacatcaacggctcggccaggcgcaggcgcaaggtggcataagtaccgtattgggtggcggtttccttgaccgtgccgccacggtacatgttcggccagaaggtgctgttggccggttccgggaagtggtggtctggctgatagatgctctggcgtctgggcaggttctggattgcatagacgtcgtcctgggttccgcggctgccgttggcgccgaggatcacttcgtgttccaggccgaaggcttcgaacttgccgtcgatataggcatcgaggccgtagtccctgtggtcgtagtccatcagcgctgcataggagttggccgtcggcgccgggtcgccgtagttgatggtgccttcgctggcggcgtatttggtgtcttgcaggttgcggctgtgcactgccgagaccttgagtttccagtcatcgttgaagtggtgggtgacgtcggcaaagaacgtggcacgccggctttgccagtcgttccaggattggccaaggcaggtcgagcggctgaggttggcgcttttgccgtcggcgtagcgcggcaggccaccccagcacggggaggcatcgacatcttcgtagctggcgccgacgcccagggtcgtgtcaggtgtgaggtcaaaatccagcgcaccgtagaacgcctggtccttgcgcttggcgatgtccatgtaggacccgcgatcctgctggctcacggcagcgcggccacgcagcgtgccgctgtcattcagtgggccgccggtgtcgagatcggcgcggtagttgtcccaggtgccggccgacagcgacaggcttgtggtgggcttggcctgcgggcgcttgcgcacaaagttcaccgcgccgcttgcggtgccggcccccttgagcatgccggcggcgcccttgagcacttccacccggtcataaattgccatgttcgcactgaagctgtcggcctggacgtagtccttgcccatgtccaggggcacgccgtcgtactggtactggccgagcatcttgaaaccacgggagtagaaatacttgccacccatgggcgactcgtaggaggtgatgccgggcgtgcgctccatcacgtcgtcgatggtggtgacgttctggtcgtccatgaattggcgggtcatcacgctcaccgattgcggggtttcccgcaggctgtgttcgcccttgccgatggtgaccgcaccggtggtataggagccggtgccctcggtgctggcacccaggcgttcgccgttgataagggtagcgcccaggctcagcgcgccggtggcggccacttgcggcaatagcatccatgtgctgttgccctggcgttgggcttcaaggccttggccgcgcagcaattgctcaagcgcttgctgaggatcaaggcggccgctcaagcccgggcttgtcttgccggcgacgctggtggcgtcgtaggacaggctgataccggcctggcgtgcgaactgatccaatgcagcggcgagggcgccggcagcgatgttccagtcacgggcctgggtggcgctggccggtgtctcggccatcacggacaggggcagggcactgctcaggcagacgccgagcaaggccgcctgcacggcgcgcttgaggggtgaacgttgggaggggaacgcttgcatgaccgcggggtgctcctgaaggaagtggacagaaccggcctgttgatcggcctttccttacaggtcgagcggcaatgagaattcacctcatttattttttgaaaggttacgcgcgcgcggaaaccgtcacccaatagcggctgcggtacgtgacatcaagcttgagtgattgcgcgaccaggctcagcacctgatcggtgtcgtccagttgataagtccccgacacccgcagcccggccaccgcctcgctgcaacgcaccaggccgttgcgatagcgcgccagttcggcgaggaagtcgtccagccgcatcgcgtgtgcgctgatcacgccgtcgctccaggcccaggggtcaaggccgttgccgacaaccggacgaatgccgctgcgattgaacaacacctgctcgccaggcttgagtacctggcgggcattgcccgcatggctgttggcaaacaccgccactgtgccctgttgcaccgccagctgtgtgccttgggcttcttcgcggaccagcagacgcgtgccaagggtgcgcaggtagccgtcgcgggtctgtacccagaacggtcggtgatcggtgccggtgttgaccagtatttcaccctggcgcaaacgcaccaggcgacgctctttatcgaaggccgtgtcgagggcgctggcgctgttcaactggatccggctgccatcgtccagcgccacccagcgccgctcgccggtggccgtgcggtagtcggccatcagtgcaggcagtggcgtgtagtcgcggccgagccaggtcagaccggccgcacccgcaaccaggccgagcagtttcaagccttcacgacgggagatgtgtcggcgcgcgccgtgcagggcgtgccggccgacctggggcggcagttggctgaaatcgtcattcattgcggccacccgctgccacaccaactggtgctcggcgctggtgtgcagccagcgttcgaacgcggcggtgctggcgtcgtcggccacgttgaagcgcagcgtgatcatccactggatggcctggtccaccaggcgcgggtcagccttcggcataacgcaagcggtaacaggcatgcagcgctttggacaagtcacgctccaccgtggccttggacacacccaggcgcagggcgatctgcgcacaggtcaggccgtccagttgcgccatcatgaaggcttcgcgcacccgcggcttgagctggtcgagcaagcggtcgatgcgttccaggctatcgagaatgagcaggcgggtttcttccgacggcacttcgagttgcggaaaatgcgcaaggctttccaggtaggcgcgctccagttcgcggcggcggtactggtcgatcatcaggctgcgggcgatgctgctcaggtaagcgcgcggctgctgcaaggtttgctgtttgcgcgcgttgagcaggcgcacgaaggtttcctgggccaggtcggcggcgtgttcacggcacccggtgcgccggctcaaccagccgcgcagccaggaatgatgggcgtggtaaagctggccgatggcggcgtggtccagtgggtgatcgctcggcatgggcatcctggcacagctgtcttaattgataatgtttcgcattctagacgttggtcgtggcccttcgcaattcccggcgcgcactgtatccagcacaattttttgtttgccgccggtgcaccgactaatctgcaggcttttcccggtggaaggcttgagcatgatcgacctggcgaccctggcggttttttccggtgctgtgctgctgttgctgttgtccccggggccgaatatggcctttgtgatcagccacggcgtgacccacggctggcgcggcgggatggcgtcggccttgggcattggcgtggccgacgtgctgctgaccgccttgaccgccaccggggtgacggcgctggtcgccagttggccgccgtcgtttgacgtgatccgttatgcgggggtggtctacctgctgtggctggtgttcaagaccttgcagaaaaaacctgggctgggtgcagaccccgtcagccgcgtgccgctgggccgggtgttcctgcaagccatgctcaacagtttgctcaaccccaaggcgctgctgttttttgtggtgttcctgccgcagttcgtgaggcccgaggcggggtccatcgctgtgcagttgatagtgttggggggcgtactgaccgtgattgcgggcgtgtttcatctgctgctgggcatgtttggcggggcgctgagccggttcttcaccaggcgctcaaaaggcgcctggttgcagaaatggggcctggcaacggtgctgacggtgctggcggtacgcctggcgctgatgtcgcgcccggcctgactaaatgtgttgggcgagcttgttgtggtgagcgggcttgccccgcgttgggnnnnnnnnnnnnnnnnnnnnnnnnnnnnnnnnnnnnnnnnnnnnnnnnnnnnnnnnnnnnnnnnnnnnnnnnnnnncccaacgcggggcaagcccgctcaccacagagaaagcgtatcaacccaaccgcgccgccgcccgagcaacgatctccccacgcacgcggcgcgactcagccgtgcgcttgttggcctcatccagcacatgcttgggcgcggtgtccgggcggccggcatcgaacggcggtgccggcgcgtattcaatctgcaattgcaccaactgcgccgccgcttcgctgtacaactccgccgccagggtcagggcaaagtcgatcccggcggtgataccgccaccggtcagcaggttgccatcgcgtacaacacgctcctgcacaggaatggcgccgagcggggcgagcaggtcgtggtaggcccagtgggtcgttgccttgcgcccgcgcagcaaacccgccgcgccaagcaccagcgagccggtacacaccgaggtcacgtagcgtgcggtctgggcctgagtcttgagaaagtccagggtctgcgggtcttccatcaaggcgccgacgccggaaccgccgggtacgcagatcacatccaggcgcgggcagtcggcataggtcatggtcggggtgaacgccaggccggtactggaggtgacgggggccaggtctttccacaccaggtgcaacttcacgtccggcagggaacccagtacgtcgtaagggccggtaaggtccagttgctggatgccggggaacaacagaaagccgatctgcaaggtcatgaatgaagctccgttaaaggggtggacggcttcactctagaggcctaggctttggcgaatacgccattgaacccacgaatcacgccaatcatgcctcgaatcgtccatgtactcgcttttgataacgcccaggtgctcgatgtcaccgggccgctgcaggtgttcgcctccaccaatgacctggcgcgccagcgcggcgaacctttgccttacgcggtatcggtggtcgccgcgcaagcgcagccggtaatgacctccgccggcctggcgctggtggccgagccgctgcccgccgttgatgcgccgtgcgacacactggtgattgccgggggctggggcgtgtatggcgcagctgaagacccggcgctggtggactgggtgcgcgagaaagccagacacacccgccgcatgacatcggtgtgcaccggcgctttcctgctggccgccagcggcctgctcgacggctgccgcgtggctactcactggacccgttgtgaagagctggcgcgcaagttccctgcgctgacggtggagtccaacccgatcttcatccagcagggcgccgtctggacctccgctggtgtcaccgccggtatcgacctgtgcctggcgctggtggaagaagacctgggccgcgccgtagccctggaagtggcgcggcacctggtggtgttcctcaagcgccccggtggccagtcgcaattcagcgtgacgctgtccctgcaaaaagacgacagccgcttcgccgacctgcacgcctgggtggctgaaaacctcaccctggatttgaacatcccgaccctggccgcccaggccggcatgagcgagcgcagctttgtgcgccactaccgcgccgaaaccggccagaccccggcgcgtgccgtcgaactcatccgcgtcgaaaccgcgcgccggcaattggctgatagcagtgcctcgatcaaacgcattgccgtgcaatgtgggttcggctgcgaagaaaccctgcgccgcagctttctgcgcgccatgtcggtgacgccccaggcttatcgtgaacgtttttcgccgagcaattccaacaccgcatccagtgtggcctgaggtgcttcctgagggatgttgtgacccactccgggcaacacctggcgccgataaaatccgctgaaatgctccacgtcatcatccacgtcgggcggcggacccacgccatcatcggcaccgcataatgaaatgctcggcaccgagatcgccggctgcaacagcagggcttgctcgatggcttccagcgccgggtcgccgggtgcgtacatgaagcggtgacggtaggagtgaatcaccacctcgacaaaatccgggttatcgaacgatggcgcggtctgcgcatacagccccggcccctcggcccaggacggcgaccacagtgaccacaacagcttgcacagttcgccccggttggcggtcaagccgtccacgccgcgctgggtatgaaagtagtactgataccacaagcgatgctccgtcaccggcgccctgggcttgcgcgacttggcgatgtcctggatgttgtagccatccccggtcaccagcccgcgcacccgctcgggccacaacgccgcgacgatacacgcggcgcgcccgccccagtcgtacccggccagcgtggcctgcgggatcgccagtgcatccatgaaatccagcaggtctttggccagcgccgcctgctgcccggagcgcatcacctgcgcgttgataaaacgagtcgggccgtaaccccgcaggtagggcaccagcaccctgtaacccagcccggcaagtaccggtgcaatcgcgtcataggcacgtgggtcgtaagggaagccgtgcagcaggatcactggttggccgttgatggggccatgggcttcataggctatatcgagcattggcgtgcgtacgtagagcggtgggggtgtcatggtcatggttcatcaaatggccagagatgctggaactctagccgaaaggtgtgacgggaaggggtgggttttgagactgtgggcttacttgtccagtctggattgatacggccattcccgcgccagcagccccagcacttcaaggtcatgtcgctggccgttccagaatccggcttctcgcagttttccttcggctttgaagtcaagacgctccagcagcgcccgggacgcgtggttatgtggatgaaccagcgcttccacccgctgcaaatgcatctgcctgaaaccccattccagggtggtgcgcagcgcttcgctcatcagacccacgcctcggaattgcggtgcaagctcacaggccagcgagcaactgttccatccacggttccacttgaacaagccacaactaccgatcaatcggccctggaactccagcccccagcgagtcccgggattcggttgggtacgccattgggcaaaggtctcgatcaggcgctttgcctgggcaatgtcggtcatcgggtcagcgccgaaccagcgcatactgtcggtatcgcggtagatggcgaacagcgcctgggcatcttgggtcaccaactcccgcagttgcaggcgttgagtgtgcagggtaggaaagggggtcataaggtggcagcgacctggtctcgatcaaccacgtgcccaaagtgatgccgccacaagtccacccccaactgccccgaccgatccagcgacgagcccatggtcagatcgctgatcaacgtcggctgcaacccggcatcaaacaacgcaaaccccgccgccagcacgcaggtgtcggtctggataccgcacaccagcacgcgttcgggggccaggcttttcaggtaggcgacggtctcgggtgtcggcgcgtagccgtgcttgatgaagatgcggtccgccgcaatcaggctctggtcatccggtgccggttgccagccaagttgccgggtgaagggggtgatgcgctcgtcgtgacgctccacggtggcgattgacggcatgcgacccagcagggcattgatgccgtccaccagccacgcgggagggttgaacgagggttgcacatcgatgatcagcagtacctggcgcatggtgttcctgtccgtggcctggagggctgcccattgtgcacaggctatttcagggttgccaggtggttttctccccgctgagcttgcggtccaggaacgtcgccgcgctgatcaacgccaagtggctcagggcctggggcgtattgcccaggtgccgggcctggttgtcgaactcttcggcgtacaaacccagggggttggcgtagcgcagcagttgttcgaattccaggtgggctttttccacctggccggcgcgggccaggcattcgacgtaccagaacgagcaggccgcaaacgcaccttcggtaccttgcagtccgtcgatctggctgtcgtcgttgcggtagcggtagaccatgccgtcgcgcaccaggcttttctggatcgcttccagggtagagagccagcgcggatcggtcgccgcgacaaagcgcaccagcggcatcagcagcatcgaaccgtccagcgcggtgctgccgatatgctgcacgaaatgcccgcgctcctcgttccagaagttgctccagatatccgcgtagatcgcctggcgggtctggtcccagcgcgcgaacggcgccggcagtgagcgcttggacgccaggcggatggcacggtccagcgcgacccagcacatcagtcgcgaatgcaggaagtggtgctgctcgccgcgcatttcccagatgcccacgtcctgggtgttccagatttcgcagacttggtcggcgacttccacggtgtgcttccagccttcgtgggagatggcttcgccgtacttgttgaccaggtacaccgcgtccatcagttcaccgtagatgtccaactggatctggtcgaatgccccgttgccgatgcgcaccggcttggcgccgccgtggcctttgaagtggtccaactcggcttccggcagttcctggcgaccgtcgatgccgtagaggatattgatcttagtcggctggccgcagcagtcactgacgcggcccttgagccagcgcatataggcgttggcctcgtcgacaaagcccaggcgcatgaaggcgtagacggtgaacgacgcatcgcggatccaggtatagcgatagtcccagttgcgctctccgccggggctttccggcaggccgaaggtggcggcggcgatgatcgcgccgtgtttgcgcgacgtcagcagcttgagcgccagggccgagcggttgaccatttcgcgccagcgccctcggtagttcgattgcgcgatccagccgcgccagaatttcaaggtgtgggccagggccaggtcggtgcaaccgctgtctacgcgttcgtcgtcctggccgccgaggacgaactcggcaccttcgtcctggtccagggtgaagcgcgctatggcagcgccgtcctcgatctgcagcggatggctgccggacaggcgcaggccgggctggccgtcggcactgaagcacacggtgccgttgtcgacggttgcatgtgtaggcgtgcgcgcatagtcatgccgcaccgcgcagcgcagatgaatctcggccgtgccgctgaccacccgcacccggcgtatcagcagtggcaggtcgtcgatttcttcgctgatggccagcaggtcagtgatctctaccacagcatcatcgctgagccagcgggtttgcagcacgttggtgtcgggcaggtagatctgctcgcgacgcgcgttgggcaggtccggagtgagttggaagatgccggcatcggggctgtccagcagcgaacagaagacggacgggctgtcgaattccggccagcagaagaagtcgatgctgcctttgtcgttcaccagtgccgcgctgcgcatatcaccgatgatgccgtgggcatcaatggggctttgttgttcgctcttcaaatcaaccattgccacggaactccggatacaggctcatgccgccatcgataaacagcgtgctgccgaccacataatcggaagcatcgctggctagccacaccacggcgttggccacgtcttccacatcgccgacccgtccataaggaatcagcttcagcagttccttttccgctgcgccttcggtggcggcacggttgatcgcggtgcggatcgcccccggtgcgatgccgttgatgcggatacgctgttcgctgacttcctgggcgagggtgcgcatcagcatctccacgccgcccttggatgccgcgtaattcacatgcccggcccaggggatcaactggtgcaccgagctcatgtggatgattttgccggctgcccgcgatacgccttcgcgtatgccctggcggttgaagatacgcacggcggcacgggcacacaggaactggccggtgaggttgacgccgatcaccgtgttccagtcgtcgaggctcatgtccaccaggttggcgtccttctgcaggccggagttggccaccaggatgtccaggtggccgaaggcatccagggcctgggcaaacagccgttctacctcttcttctattgatacgttggcgccgatggcaatcgcccggccaccctcggcgttgatctgcttggccagtgcctcggccggggccgcctggctgttgtaattcagcaccacggccgctccggcttgtgccagagccttggccgcgccggcgccgattccggaactggcgccggttaccagcgccacttgttgctccaacgagatacgcattgctcaccgacctttatttcgtgagttcaagtagctgactgacggtgcgcaagggaagttcagccgtgtgaatttagcgactacaaccatggtggaaaatggaataacagaactataaaaaataaccataagatactaaaaaaccgcttaaaagcgtttgacaggctttttgtcgccgtgtcttataggcacacctcaacccgctccgttggtagttcggatgtcatcgcggggccacttacaagaggtatctatgtgcctttcggccgatataggggaactaccagttcagggaaaaaccgctgccttagttggcatgccgaagttagtgatctttgattgcgacggtgtactcgtccaaagtgaagacatcaccctgtctgtgttgatctccatgcttaatgcgcttgcgcagggcaatacaacactggatgtgacctattttatcgaacactttcgtgggcgaaggatcgcggattgtttgcgtgaggctgaacagattttaaatgttcgcttgggtcatgagtttgaacagcgctttcgcaagcaagcgctggaagcattgacacagggtttaacagcgacggatggaattgttgaagtactgcaaggcttgcaggttccttgttgtgttgcctccagcgcaccccgcagcaagatagaacactgtttgcgtattgccgggctattttcttatttcgaagggcgaatattcagttgttatgaactgggtcgctggaagcctgatccattggtgtttttgacggcctgtgaaacttacgacattgccgtgagtgaggcgctggttattgaagacagtgtcacgggtattcaggcggccgtcgctgccaatataaaagtattgggttttggtccaccgcaccggcatgcacagttggcggctgccggcgcattaccgatcgccgacatgcgcgaagtactggcgattttcaattgaccttattactcagggaggaggcattgtgaatacactgggttacctggaaagacttaaacgcaacgatcaatcttcagaggtatggtgggattcatcgcccgctgtctacctgccttacaaacagcacttgctggataagtacccggcggccgcagcttatatagatgcgttgatgccggacgatttctcccaacccaggggcctgtgcagtgtgaccaccaatccccggttggtgaccgccgttatccttgaaaagcgcgaatactggtcatcgcgcttaaacctggcgagcctgtctcccagccagttgcacaaacagctgtataacgaggtcatcgtcgaaggggcggcggctctccagccgttgtgggttcaatcggcgcaggtcgaaggctggatctcagcccaggtcgaccctgtggatgtgcgctgcaccgagcgcatgaccgtcagggggctggagctgcatcgcctggcaccgaatgtgatggtcaaggtgccgggcagtctggaggggttggtgaccgtcgagcaactggccgcccagggcgcgtcgatcaatatcaccttctgcttcacggttgcgcagttccaggccggcatccaggccatcgagcggggcatggcgaccgcgcgcagcaatgggatcgatactgcccactgcaagtacgtgatcaccttcatgatcgggcgtttcgcctgtcagcccgaactcacgctgcaggccgcggagcgtggcctggcattcagcgccgaggagctgcgctgggccgagctgatgatctacgagcaggtccaggcgttggtggcggccgcgagcgtgccggtccaaaccctgctgtccagcatcaaagtcgatgtggacgagcgaggcaacaagcattgctggcacctggaaaagaccgggcatgcggcaacctgctacacgctgacgccggacgtggttgagttcctcatcgagcgcgaaagccacggcaaaccggtggtgcctgctgccgggccacagaaaccgccagcgtcgacattcgccaagctgatccgtatcccgtacttctacgaagcctactttgtcgacagcatcgagccgtacgactttggcaaccacgaggcgtttatcaacgcctgcaacgaggccaacagcgcgcaccggcgcctggccgattactgcgttcggctctgcccggtgaccaagcccttcaagcgcgcgctcaacgcgttgctggccgctgaattcggggtgatcgcatgaaccggatgatcgggttatgggcacacccacgttcgcgctccaccgtgctggaacgtgtgtttatcgagcggggcgattttgaggtcttccacgagccgtttgcgcacatggcgttttccgaggactcggcgatcccttcggatgagtgggatcacagtttgcccacgacgtaccagggtataaaacagcatctgttgaccgcgcgtgagcgcagcaacgtgtttcataaagacatgtgctaccactgcctggatgatttgaaagtcgacagtgggtttcttgcgcaacaggacaatatctttcttatccgcgaaccggccagcagtattatttcccatcatcgggtgcatccggatatgccgttgcaggccattgggcataaagccctctacgacatcttttgtgtggttacaaagctcacgggcaaagtgccctatgtgattaatgccgatgatttggctgccgcacccgagcgggtgattcgtaagttatgcgattacctgggtattgagtttctgccgcacgccatgacgtggaagcgcgagtgcccgcaacaatggaaaacctggcgtcgttggcatgctgcggcggaaaacagtgagcgcattgtgacgccggataaacaacatattgatatgaacgcccttgaccaatacccgaagttaaaagcgatgtatgaataccatcggactttctacgcgcgcatgaacgaattttgccaataaggatagttgtatgaagaagttgattgttaccggagcggccaacggcattggtcgggccactgtggacatggcgattcaacagggttacttcgttattggcgccgacaaggatgccgaaggcctcgatgtgttacagcgactctacggcgctgaagtgttcgaagcgcagattgccgacttttccgatatggcggctatcaagggttttattccaaaactgtacgagcgccatgccactatttatggtttggtcaataacgccgggatttatcacggtaaaagtgtctacgcgtattccgatgagcagatcgacgaaatcctcaccgtcaatctcaaggcactggtctatctgtccaaggacttcgccgaacgggaaatgatccacgaagccccgcgcagcatcgtcaacattgcgtcggtggccggtgaagtgggcagctgcgatgccctctacggcgccaccaaggcggcggtgatcggcctgaccaaggccaatgcctggaactttgcgccgttcgtgcgggtaaacgtggtgtccccggcgctgatccatgacaccgccatctacgacactatccccgaataccgtcgcgccgagtacgcacgccaggaggtcctcaaggacccgatccggcccagcggcgtggccgaggtcatcatgctgctggtcggcgacgccatgcgtcacagcaccggcagggtgatttcggtcgacaacggagcctacccacggtgagccattcgatgcgcaagaaaaaactgctgctggtgggcgccggcaacctgtgcctgcaaatcctcaagattctcgggccgaaaaacgcgttcgagtttgtggtgttgggccgcaacgaagaagcgacgatccggctgtgcaacctggtggcactgtcgtgtgcgcaactggggcaattcattgcgatcaagccggtgattgccgaccttacggacatcggcaaggtgacccagctgctgcgcgaagaagccccggacatgctggtgaactgcgcgtcgctgcagtcgtggcgggtgattaccgggttgcccaagctgtcgttcgaaaagctcgaccaggcccagttcgggccgtggctgcccatgcacctgacgttgatgcactgcctgatgcaggcggtgaaggcctccggcatctcggccaaaaccgtcaacgcggcgttccccgatgcggtcaacccgatcctggcgcacgtcggcctggctcccgatatcggcgtgggcaatgtggccaacctgattccggcggtgcgcttttccatcgcccgtttgctcgaatgtgcgccggccgatgtacaggtgcagctgtacgcccagcattacttcagccactacgtaccgcgtggtggcctgccaccacgtgccagctaccgcctgttgtatgaagtgcgcgaccgcccacaggcgccccgcctgccggccgaggcgattttttctacggtgaaatccgagttccgtcgcctgggcggggtggacgggcagttccttacggcgtgctccgccgtcacggtgatcgaagggctgttttcagccacgccggtgcgggtgcatgcgcctggccctcttgggcttccgggcggctatcccgtgcaactgcacgaggggcggatcgaggtgcagttctccgaggcctgcccacaggatgaggcggtgcgcatcaacagcatctgccagagccaggacggcatcgacgaaatccattgcgatggttccgtcacctacaacccgcagtgcatggccgtcatgcaatcgatgctggggtactccaagcacagcatgtccatcgaacagtccgccgagtttgcccatgagttggcgagcaagtacctgtccttcaagaattcaacctggtaggtgcgtcatgaatcagatgaccagaaacaagcacaacgacgtggccagttactccgcgcagtactcgacggaatttgtcgaacggtgggatgagttgatcgattgggagaaacgcaaggcgggggagggcgggttcttcgaaaacctgttgcgaagccacggcgtgcagtcggtgatcgacgtctcgacgggcagtggttttcatgcggtccagctcaagcaggcgggctttgaggtggtggccaccgatggcagcagcaccatgttgaccaaggcgcgggcgaactttcgcaaacatggcctggatatccagtcccattaccgcgactggcattcactggactcgcaggagctggggcaattcgacgccgtcgtgtgcctgggcagttcgctgtgccatgtgtttgaagcccacaatcggttgcgggtgttggcgaaattcagggccttgctcaagccgggtgggttgctgattgtggaccagcgcaatttcttcgccatccgtgccggtaaattcaaagccagtggtcattactattactgcggtacaaacgcttcggtgagcttgggccaggtcgatgaacgcctgtgtgagttcatctattccttcgatgacgcgcagcagtacaggctgcaggtttaccccctgttgccgggggaattgaagggggaagtgctcaagtccgggtttaccgaccatcaaagctacggtgatttcgagcctgactacgacatgatggattgtgactttgtcatccacactgcgcgcgccgaatagggaggcttgatgagcacactcgtacagagcaatgcccgcccactggacagtgttgtgctggcggtggtcctcaccggctttgtggccagcacctatggtttcggggtttacctgttcgccaacctggtggtggacatgcgccgcgacatcggctttgactacaccacggtgggcctgatcaccggcggcgcgcagattggcttcctgctgttttcgtcggtgaccagttacatcagccgtttcttcgaaggctggaaaatcagcctggtgtcgaccgtgatgacgtccctggcgctgctgggcctgagcgtcagcgacagcatctggttgtcgggggccttgttgatcctgctcggtggttgctccgcctcggtgtacatcccgctggcggaaatcgtcaccaagggcttcagcccgggcaatcgctcgcgggtcatggggctgatctccagtggcaccagctacggcgtgttcatcaatggcttgctggtgtcgttcctgaccttgaatggtggctggcgctcgatctggctcactgccggcctgatctcggtggccctgtgtctggtggcctggtttctgttgcgcaacctggccgcgagccaggacaccgggtttgccggcgagcgcgccgtagcgtttgacagccatcagccgtggctcagccgctcgctgtacctgacctgggccatcgcgtttctcaatggcatggcattgctgccgttccagacgtacctggcgcccttcctgcgcgatgaattgggcgtatcggttcaagacgccgggtttatctggaccaccatcggtgcggtgggcatggcctcgggctttctggtggggtggattgccgacaaggtcggtgtgcgggcgtcgctggcgatgtgtttcctcagtgcaggactggccgccaccctggtgttcagtttcaacagcctcccgccgttctacctggccgcgttcctgtttgcgctggcgttctatcccattttcgggctggtccccagttacatcgggcagatcgtgccggtcagccggctgacccaggccttcggcattgccaacgtgttgatcggcctgggtggcgtgtgcggcaactttctgggcggtttttccaaggacctgaccgggtcgttctcgacggtctactgggtggttgcgctgttgctgttcgtgcaatgcgtgatggtgttcatgttgggtaaaccgccggttgcggcgaaggagggcgagcggccatgagttattttccagacagtccaagccagaacctgcacgcgtttgcgttcagccatcggcgcgccggaaacgcgcacaagcctgcggtcatctggatgacggggatctcggcgtccggcaaatcgaccatcgctgatgcgctggacagcgccttgcagaaacaggggcggatcaccgcgatcattgacggtgactcggtacgtggcgggttgtgccgggacctgggttttaccgacagcgaccgcgatgagaatatccgacgggtcgccgaagtggcccggttgatgatggaggcggggctgatggtgatcgtggcgctgatttcaccctcgtcggccagtcggcattacgcccgttcgatcatcggcaatgagttttttgtggaagtgcatgtggatgcacccttggaaatcgccgaacaacgtgacccgaaggggctgtataaaaaagcccgcgcggggttgatcaagcactttaccgggatcgactcccagtatgacgtgccggtgtttccggaagtgcacttgaatacccaggcgctgtcagtggagcagtcggtcgaggcgattctggattgggtggggcacaacgacagtcgcggttagccgtctgtctttgcgtcggctttgcgccgggggggcaatgtctgcaacttgaaaaaacaaggtaatctgcgccatcgcagggagaacgcgttttttcaggagtaggcatgacacattttacgggcactgcaaaatcgatccgtctgattggtggggcccgggtcttggactttatcaataccaccaatgggcggcgccccggcacttcgctcaaggtcattgaagaacggctgaccagttttcagttcttctttgaatgggccttgcatgcgtcgttgatctcggcccaggagttcgatgactacaagccaatggtgtttgagtcatcgattgcctatcaacccaacctcgacgcgatcattgcgttcagggaatgcctgtacgccgtgttctacccgctgtccttgcaagctgccgcgcccgacgacgcgttgcagcagatcaacgagaccttccagcaagacgctgcacgacgggtgctgcggtctgtcgagggcaagcctgcctgggcgtggatggcctgcaccacggcgcaggagctcacggccatggtgctggggcggttggccatcgaggccacgcaattgctggtatccggtgatctgcacgcattgcgcagttgcagcgctaccgactgcgactgggtgttcctcgatatctccaagaacaaacagcgcaaatggtgccagatgagcgtgtgcggcagccgggagaaactcagccggctcagacaggtgggtggcaaaaccgcgcattgagggcctatggcgagtagcaattgccccgcttaataggaagcattactattcacgtcccgcctccccagtgctcccgcgatgatccctcagccgccccgcagaacaggctttttcgaacactacgaagagttgatcgggacctggacgcgccgcctgagaaaccgccagcaggccgaagacctggcccatgacacctttgtgcgggtgcttgaggcaaaatcctccgaggttgagcaaccccgggcctatctgcatcaaacggcgcgcaatattgcggttgacgcctttcgacgcgaagaccgtcgcgaggccatgaccctggaagcctttgatcagcgttcgccgcacgcgggcgacccggagcatttcatgcacgcgatccagttggcggactttatcgagcgggccttggccgaactgccgctcaattgccgcaggattttcatctggcagaaaatcgagggccttacccaacaggaaatcgccgaccgcctggggctgtctaaaaacatggtggaaaagtatatgatccgcaccctgcggcatctgcgcgaccgcctggacgcgatggcgccatgatcgcccgctctgaaacaggatcatccatgatggataaccgtgcccgagacgaagccgcgcaatggtttgtgcgcctgcaagacgccgagttgagtgctgccgaacgccagcgtttcgacgcatggcgcactgaacatcccgatcaccagtacgaattcgatgtattgcagggcgtgtggagtgctgctgacttactgcccaaagcccgcctgcaggcgctgtgcgaagctcctgtggagcgtccaaaacgccgtgccgtcttgcgttatgcagtagctgcgagcgtgatcgccgttgcgctggggttgggcctgttcagtgggttggatcatccgaagccctacagcgccgagttcagcacgcgcctgggtgaacatcgccaggtggccttgcccgacggttcggtgatggacctcaacagccgcagcatcgtcaaggtgcattacgaaaaaggtcggcgtggcgtcgagatcaagcagggcgaagcgatgttcagcgtcgaacatgacaccagcaggccttttgtcgtggtggccggcgcagggcaggtgaccgtgaccggcacgcgattcgatgtgcgccgcgatgacgaccagacccgagtcatggtcgaagctggcaccgtaaaggtacaaggccgctcgcctgacaaggtggtgacgctgacggcgggcctgggcagccatgtcgacaaccagggacgggtggccgcggcctacgcggtgaacaccgaggaattgaccgcttggcgcactggcaagctggtcttcaacaacgcttcgttgggcgaagtggtccgggaagtctcgcgttatcgcgagcaaccgctgcgggtcagcacgccggccgtgggcaacctgcgcgtgaccagcgtgttcaaggccaacgacactgacgccttgctcaaggccttgccgcacattctgccggtggcgctgcgcaccttgccggacggcagccaggaaattatttcacgctgacattcaggtttttttcgagttcttcgtcttctcctgcaactgcaactggtttgcattaacagccgcacactcttgcgatcacaggactaggttcgacgtgaaaaaacttgccgtgaacaacaataaaatctcccgctgggcgccgctggccctggcgcttgcggtcagtgccgcgctgcctgtggcttacgccgccgagtctatccacatcaaggcccagcccctgggtgcagcgctgagccagttgggccagcagacgtccctgcaagtattcttcagcccggagctggttgcaggcaagcaagcgccggcggtcgacggcaacctctcccccgaacaggccctgcgccagttgctgcaaggcagcggcctggactaccagatcgatgccggctccgtgaccctgcgcccgttgaacagcggcaccggtgaagccggctcgccgctggaactgggcgccaccgatatcaaggtcgtgggcgactggctcggcgacgccaacgccgaagtggtgcagaaccaccccggcgcgcgcacggtgatccgccgcgaagccatggtggagcagggcgcgatgaacgtcggcgatgtgctgcgccgtgtgccgggtgtgcaggtgcaggaatccaacggcaccggcggcagcgatatttccctcaacgttggcgtacgtggcctgacgtcgcgcctgtcgccacgttccaccgtgttgatcgacggcgtaccagcagcgttcgcgccgtacggtcaaccgcaactgtcgatggcaccgatttccgccggtaacctggacagcatcgacgtggtgcgcggtgccggttccgtacgctacgggccacagaacgtcggcggcgtaatcaacttcgtgacccgcgccatccccgagaaattctccggtgaggtcggcaccaccctgcaaacctccgcccatggcggctggaagcatgtcgacaatgcgtttatcggcggcactgccgacaacggcatcggcgccgccttgctgtactccggggtcaatggcaacggttatcgcaacagcaacaactctaacgacatcgacgacgtgatcttcaagacccactgggcgccgaccgatcaagacgacttctcgctcaacttccactactacgacgccagcgccgacatgcctggtggtctgacgcagaagcagttcgatgccaacccgtaccaatcggtacgcgactgggacaacttcagcggccgccgcaaggacgtgtccttcaaatacatccgccagatcgacgaccgtacccaggccgaagtgctgacctattactccgacagcttccgcggcagcaacatcgccaaccgtgatttgaagaccctcggttcctacccgcgcacctattacaccttcggcatcgagccacgcgtctcccatgtgttcgacgtaggcccgagcacccaggaagtcagcctgggctatcgctacctcaaggaaggcatgcacgagcaggcgaccagcctgaatctggtcaacaatgtaccgacgccgggcggacagagtgacggccacgtctatcaggatcgcaccgggggcaccgaggccaacgcgttctacatcgacaacaagatcgatatcggcaagtggaccgtgactccggggatccgtttcgaagatattcgcaccgaatggcacgaccgcccggtgatcgcgctgaacggcacccgcacccaggaaaaacgccgcgaagtccacaacaacgaaccgctgccagcattgagcgtgatgtaccacgtctccgacgcctggaaactgttcgccaactacgagacttcgtttggcagcctgcaatacttccaactgggccagggcggcaccggcgaccagaccgccaacggcctcaacccggaaaaggccaagacctacgaggtcggcacacgctacaacgacaatgtctggggcggtgagctgacgttcttctacatcgacttctcggatgagctgcaatatgtcagcaacgatgtaggctggaccaacctcggcgccaccaagcacaccggtatcgaagcctcggcgcattacgacctgtcgaacctggacccgcgcctggatggcctgaccgccaatgccggcttcacctacaccaaggccacctccgaaggtgacgtgccgttcaagggccgtgacctgccgctgtactcccgtgaagtggccaccttgggcctgcgttacgacgtcaaccgctggacccataacctggatgtgtacgcccagtccggccagcgtgcgccgggtacgaccagcacctatgtcacccagggcacggctgacggtcagtacggtgatattccaggctacgtctcggtcaacgtgcgcagtggctatgactttggcgagcagttgtccaacctgaagctgggtgtgggcgtgaagaacgtcttcgaccaacagcactacacccgttccagtgacaacaacgccgggttgtacctgggcgagccacgcacgttcttcgtacaggccagcgtcgggttctgagtcatctcgatagaaaaagtcgcagctccattcagggctgcgattttttttgccggtttcctacgcgtgcacagcgtatttggctgtctttcgcggaactgattccgacgcaacccccacacatgggcatacctgaggggcctcgacgctacgttggagcgacagcctgaaggtcacgctcactgtattggagaaactcatgtcggtatcgactctcgatgcacccgcatctgcatcaaacacgtccaaccgtgcgctggcagacgccaagcctcaggccaaacctgccggctcggcgcctacagcgctttctttcaatgaccatggcaatgccagcgtcagctttcacgccgaagagaataagtccgggcctgtgtttggtaatgctcagccaaccatggaccgtcactttccgggtcagcacagcgcgttcatgccgctcagtttgctggataggttgagagaatggatggccagtttgtttgctggtcaccgaccatcgatgcgtccgggttgtggtaatccaccgccaaggccaaattctggctggagcaacccgccgccacgaccgaaccccactgttggcaagccctgtccgacccgaccgtgcgaatctgatgctgactacagcctgaagagccgtaaacagttgatggggctgatgcgcgacaattttccagccttccaggatcccaggtacccgggttacctgagcgttgacagccttaaagcgaaggcgaatcggccgttgctccctgagtacggtccgaacaaagaagagaacaagaaaaagaaccaggaaactctcctggccaggcaagtcttgaaagatccgaaacttatggatgccatcttccgaaacccggtcacaggcgcacgggagcgtctggccagcccacaaaggctggacatgcttgccaaaagggaggactacttcacctactacagcgaaaagcaattgcgccaagaagtgcgtgagcattggggccggaatccgcggatcgaagtcctccagaggtcggcgaacagaccgctgacgggtgattctgataaggaccatcagaccctactggcgcgggagctccttttccttcgcagcgatttggtggcagagctgttcaaaaaatgacttctaaaccagtcctgtggcgcggttactgacgtctcgctaattatcgttcatgcgccgcaacaacggttgcggcgcggtcatccatcgtgcgtgaactgtttgcgctcaatgccactgacctcctatccaacggctttgttaaaaacggtcactcttcagctaacacgtgagagctaaccaatgacttcaacctccttcaaccgcccccccgtgggctgccaggggtttgctggctctggccatgagccggacctccccgcagcaggtagaggcatcgctaaagaggatcctctgggcacgccgtattcacacgctgccgagacccgccgtatgaaggccttcgatggccagggcaagttccaggcgccggtcgccgatgacttttgccgcggcttgaccgagtctggactgcactcggtggatgatgccaaggcgccaggaagcgtcggggtcttcgatggcttgaagacctggttgcgcagacagaggggcaattgatgcccggtgtcagcatctttttacatgctgtcattggtagttaccgatctgacggaactgccgtatgtattcggccacacatcaggtgcccgtctgcctggagtccattcaatgatttcggtgatcacggtcgcgctcactaaaccggtgaggatctgaaaaagttggagaaaacgcatgagtatcgagggtgtatcaagactctgccggccggccccgaatgtcgcaagtgagccatcaaccccgtcacaaccggccgcccagccttacaccaggagtgcggtttatgctgcgcagccggatggggcgcacaggccaaggctgttgcgcacagcgcaactcgggctgagtcaccgggcgctgcagaatgcgcccaccgcacgcgcacaggtcagcgaacccgacgcaacatggaccgacaggcaactggcgcaagcgttggaaaaaggcttcggtttgctgcacccgtttctgaaagaggggcgattgacgtactctgcgttgtgccgggtggccgctgaatgatggggcaaagcgatgagctgaacagggtcatcaacgtcgtccgcgaactgctcaagcgtccatcactgattgacgcgatcatgaaccgcgacggttacatcacgcgagacagtctcatggcagccgctgctttaccgggtaacagctcgcccagtgagttcagccaggacccgttccatgcccaagacaatgactgcgtagtacaggccttgaagaacctgttcgagcaactgagggacccgaccaaggaccgcacgttcctttttgaaccgtatcagtacctcgcgattgaaacgctcatgaaggtcatgcaggacccctacgacgttgatcatgacggtgtccccatgctggaatcttctaccggcatgcccaagcccaagtacagcgaactctgtgtctataccgcgaagaacattatcgagcgcccggggctgctgctttcactggaacgtgtcaacagcccgcgactgttcggcccgcctcatcatgcaggctatctcagtaacaagagccttgatctctggcgggagcggtacaaggggcgcaaagcacgctgacattagaccttgaggattttgccgctgatggccaccgcggccagcagtagggcgatcagcaaaaaggcggtactcaggctgctgccatgggcgataaagccgatcacggcggggccggcaagaataccggcgtaacccaaggtggtaatggccggcaccgcgatatgttccggcatgaccttttgcttgccgacggcggtgtacagcaccggcacaatattcgaacagccggcaccgaccagcgcatagcccagcagtgcggtttcccatgccggaaacaaggtggccagcaacatgcctgcggtggccaatgcgccgcctatcacgataacgcgcgtggcgcccaggcgtcgcacaatggcatcgccggtcaggcgtccagccgtcatggtcaaggcgaatgctgcataacccaggcctgcataggcttcgtccaggccgcgttcggcactcagaaacacggcgctccagtcgagcaccgcgccttcggccaggaaaacgataaagcacaggcagccgataaacagcaccacaccgtggggcacggcaaacgccgggccggaactttcactgccatagggcagcaggtgcggcgcagccttgagcagcgccgccagcgtaatgacgatcaccaccagggtcgcctgcaatggcgacaggcccagccccagcaaacccgagacacccgccgcaccgacgatccctcccaggctgaacagcccatgaaagcccgacatcatggttttgccgctggcgcgctcaacgatcaccgcctgcaagttgactgtggaatccaccgtgcccaggccggcaccaaacaggaacaacccagccatcagcagcggaatcgaactcaccgtcgccagcatcggtaatgccaggcagatcatgatcgtcccggcgctcaatacgcgtcggcagccgaaacgtgaggccaatgcacccgctgcgggcatggcaatgatcgaaccgacacccagacacagcagcaacaggcccagcgtgccttcgctcagtccggcgcgagccttggcatacggcaccagcggcgcccaggccgcgatgccgaagccggcaatgaagaacgcgatacgggtcgacatttgctccagccgcccgggaaccacgggcgctgaggtggggatggcagtcatgaaaaatccttggttttgcgttcaacgaacgatgtccggcgcgacatccttgcacatcaggccttggcgtgcgagccgggttcccttgggattccggctgccctgaattttatttttacaacgtggaacgccagggcgacttacggccacataagcagtaccaagtttgtaggaggcggtctggaaggtgcgtaatcccagcgagagcgtttgaaccccagggttctcgcggtggattaccaccttccaggccgcttctgaaaacgcgtcaagcgggtggtgtgcaacgccgggatcccccacaatcgagcagctcctttttaagatcaacgcctgcctcggtggatgacctcatgaccctgttctacgacgctcgcggcaacatctatggcgtggccagcccggctttattgcgccgcaagggcattgatgtacctgagagtgctgagcgtgccgcggttgctcgtaccgcctggacagcgtcggctatcgcctcggaatgcagctggggctcggtgccgcacccggctggtggcaaggcccatcgttgtgatggcctgctggtggggccgttccaggacgcgccgccgttcgatctgctgatcgtaaacaccgacggttccctggccgagcgcagcggtaatggcttgacgattttcgcccaggctctcaccgaccagggcctgatgaccgaggcttgtgagttgcgggtccatcacgacaaatcggatgcgcaatcgccggtcgctactcgggtggaacccaccgttcgtgacgatgttgcagggttctggcttgagctgggggtacctgcctttgggcttgcggcggtgggcgcgcagggggttggtcaggtgtttctggaggggactgaactgagccatgtcaccgagctggcggcgatcagcccacagtgggccgccagtcaattcgtgcgagtaggcaacccccactgtgtgacgctggtccagcagctctcggcgttgccggataacgcacagatgctgctgccaaagctgttcgagcccttgaaggcgatcgcctttgcgcccccggcgggcggcggccaaccttgtggggcgggggtcaacttgcaatgggcggcgcgccagcctggcaaccaggtcatagcgcgggtgttcgagcgcggtgaggggccgaccgcgtcctccggcaccagtgccagcgccgtcgcctgcgcggcatggcgtgcgggctgggtcgagagcggtgaagttgcagtggtgatgccgggtggcgttgcgccggtacgcttgcacgcccagggcgagacgctgctcggcgtcagtctgttcgggaccgcacggctgcaggcctgaggttttttaacggctgacgctgtgattgagtgtcggctgtttctttgtcagttagttgtgattaagaaggttaatgtaggacatttcttattgttaagaagtggcacattgactcgttttattgttttgtaaaagacacttccaacttctttgtacgaatcttcttttttattttaaaacagccgattttttcccgtaatcgctaagctttgaggcgttcagggggctttttctcggcagcttatttgcacacttaacgaggcaaagcattcttgcgcgctcattaatttacggcgggtaacaacggatggttaacgcgtttgtttcgtcacgtttcaaactgattcttccttgcatggacaccgactttcaggtgctggcattcaaaggccgcgaggtccttgatcagccttttttcatccaggtgcaggtggtcagtgaaaatccttcccttgaccttgagaggttgctccatcaacccgcctacctggatttcggaatgggcgaagggctgcatggccaggtttacgcaatcggccgggacgaccctggccggcgcatcacgctctaccacctgaccctggcaccccgcctggcctaccttgcacaccggcgcgaccagcggatcttccagcaacgcagcgtgccgcagattatcgcggcggtgcttgagcggcatggcatcctggcgggcgcctacgcattcgagcttggtcccgtggtgtatccgccacgcacgttctgtgtgcagtatgcggagagcgacctgcacttcatccagcgcctgtgtgaagaggagggtattcattaccattttcgtcatagcgcagatgctcatctgctggtattcggtgatgaccagacggtgtttcgccgcttgccccggcaacgctattgccctgctggcgggccgcaagccgctacgcaggtggtccagcgttttgacgtgcgcctggccacacgcacccagaagacggtgcgccgcgattatgacttcgaacatccttcattgcagctgcacgactgcgccggcccggctccggcgcaacctctcgaggactatcgctacccagcgggattcactggccatgcccggggcaagcggttggcgcggcgggggttggaacgtcaccagcgcgaccgtcttcgggcattgggccgcagtgatcaaccggcgctgcgcagcgggcatttccttgaattacacgatcatcccgatccgtcctgcaatgacttgtggctgatcacttcagtgcgtcatgaaggttatcagccgcaggtgctggaggaggtgacgcccaccactgatgcattccaggggtatcgcaatcgcttcaccgcgacgccttggcaagcggtgcatcgaccgcccctcaaacatcccaagccgaccatcaatggcagccagaccgcaaccgtgaccgggccgccgggggaggacgtgcattgtgacgcctatggccgggtgaaggtgcgcttccactgggaccgcctggacaaggcggatgataaaagcagttgctgggttcgggttgcatccggatgggccggtgacgggttcggtgcaacgatcatcccgcgcgtgggcatggaagtgctggtgaccttccttgaaggtgacccggaccagccgttgatcaacggttgtctgcccaatgcgtcgcatcggcccgcctacccgttgccgcagcacaagacccgcagtgtcttgcgcacccgcagtacgctggggggcgagggcgccaacgagttgtacctggaggatcgtcgtggcaaggaactcatttatcttcgtgcgcaacgggacctggagcagcgggtcggccatgacagtcggttggaagtggcgggggagcgacgggaggtcattcgcggattgagcactgctcatctggaaagcgaagaacatcgtcatatcaccggcgatcgcaagatcgagctcaaggcgaacgactacctcgatgtacaacacgacagccgaacgcatgtggggcaaaccctgatcctggaggccgggcagcagtttcatctcaagtccggtgccagcctggtgatcgacgccggggcgcaactgagcctcaaggcgggtggcgagcatctggtcatccaggccggcggcatcttcagcagtcgccccattacactgggtggggcaccgcccgtcaccctggcggcgaatgcctcggcagcggtcgacacacccaggatctccgtggtgcaaggcagcctcatggacttggccaggcaattgggggcggattactgcccggtgtgcgaacgctgccgcgaaggtcagtgtggactggcagggagggccgcttgatgccaagcatgccaggccagtggatggaccagcagcaacagaggggacggtgcctgtgtttgatccttgaagggcagaacgacgcgcgcacgccgctgctggaggttcgcgacttgccggcgtaccgcagcgtctatgcccagaccgccgtggcggagttggcggccgaaggcccggtgatcgtgctgcttgaccaactgagtgaacccgtcttgcttgacctcttgcaacaacccgatacgaactggggctggctgggcagtttgcccagcgaagacctgacggcagtgacccgacactggcgtgacaggctgctggtgggcccggaaggcgcgcaatcgctgtaccgcttccacgacaaccgtaccctggcgcgtgcgctggctcatctgtgccaggaccgctggccggtatttctagggccattgatcagcgtgtgctattggcacgaaagccactggcacacggctgacaaccgggctcccggcgagtatccggtgccggatcccgcgccctggctggatacgcccaacccaaacgcagcggccatcctgcacgccaatatcctgcgttacctgttgacggagcacagtgaagacctggcgacattggtggaattccaggacccgcgaatctggctggcacaggtactggagcaggcgcgtgcctggcagtggcaggggccggagcagctggagtttctggtggtgcgaagactggaggaggcgactcggagcagtgttttgcagtggcagccaagggtcggggaagcgcctgggcagcactttgagcgggtagtggaacagtggcgattgatggggggaaagcatgagtaggcgaaggtggggggtgttgatggtactgggggtactcgggctgacggggtgcggggggaaaccggtggatcgatttacgttggaggtggatttgccagcggaatttgaacttaaaactgccgcaaattatctgcctgctaccggtgagacctgtacgttgccgcgacgtcggggtaagcgaccggagcggaaagtctttttcacggatttcaaagctgcggcgagcagggtgagctatgaactgccgctgagtgaaaaaatcgagggctgcccttcggtactgagaagcctggagtttgagttttatgcgaagtggggcaaacgtgatacggacgtgggtgggagttttgccgctatctccgttcgcgacccctcggacgctgatatacgaggcatgccagtaacgggtgttcaggagctacataagcaatgtcagtggttgttccgcactgtggggctgcagcacgcgatcgtcaaggttcttacatgcagttcgtcaggtgcagcagtcccgttatccagacctgtgcaacgagatcagctatcaggaaaaacgctcaggatggtgctgacgatgaccgatgaggaagacccctattttgataacaactgggtcgttgttcccggtggatggaagcgttgtagaggcaaggattttgaagatctggatgcgttttgcaacggcaataccactgacttcaaacctataaaaatgccggacggtcgcatttgcgatgtctacccatcctgcaagtaagcaaggagaatctcatgaagatggatgcacggaagcaggcttttttcagtgacagcaaaccggcttgctcattgcgagggcattgggtgagtttttgtctggtcgatgaactcggcgttgggacggcgtacggtggattgccttacaccgtccacgacagtgcagggcaacagtacaaaggcagactgaatggagagggctttgccaagttagccaatatttactgcggtcctgtaatccttgtttttgacgatccgtattcaggaacagaacggttgtatcagaggttgatgtcgcgccagacttataaacttccaatcaccgagttgcagattcgtgctgagcaaactcgattttctgcctcggatggtcggcgtactgaaagcaaccccgcccagttgaaagctgactgtttctaccaggttgaagtccgtgatctggttcgccatgttgcccacttgccaccgattgcccagcgcactcatcaacctcgacgacacgcattgaaaatgctcgccgacctagggttttggccgccccaatcgacgctggtggggatcgtgttgttccccaaccaccatactgcgctggaggttcggccgctgcgagccttgcgcccgttgttttccaacgaagacagcttttgtgccttgaacctctatcaattggcattgatggcaaccttgagctactgcaatttcgggcaagaacccgctcgagcacccactgaggaggttcgatttcctttcgatccgagtgtcggccatctattcgctgaaaaactctcgggtttccacgaggcatggcgggttgatgccgagcagcagcaacgcttttatcccgtctatgaagacgtcccttactctcgacgattcgagatcctgcccttcgatcctgagttgtatcctcagaaccatcctgagcgggcagaagaacaagaatatcctgcgcgtttgcattttttcgacgacgaaaaattcggcactgatacccaggcgttcatcactcatcacgaagaggtgattctgattgcggtgcgcggaacggccagcgctgctgacgggttacgggacgctaatgctcatcaagtggtttttttggagggcgttggcaaggtgcatgaaggtttctatcaagcctatcaggcaatgcgcaacttcatactcagctacctcagacaatttcacaccaaccaacgaataatcatctgcggccacagcctgggcggtgcaattgccttgctcttggcagaaggcctgcgtcggtcgccggagggcaactacaacatcctcctctacacctacggcgccccccgcgccgccgattccgaattcaccgcgggcgcctccaccctggtccaccaccgtatcgtcaaccacaacgaccctgtccccagcgtccccgccccgtggatgaacaccactgccaagctctgggtcccaggcgccgtcacgctgttcagcgcgcccgcgccgggtgggttgctgttcgctgccggcctggtacgtttcggtggcaacccctacgagcaccatggcgaacaacaccatttcatgccgatcacgctcccggatggcacgcattcttcggtgttgtggcaacccggctgtgagtccatccaggaggccggttgcaaccgggcgctgcaactccacggtgatatgcctgaacgtgacaacctgctcaagcagctgttccaggccagccagcatttcatgaccgccagctacattccggccgcctgggcaacactccggcgctggcagcaaacccaggaaagcaacgggcccttggtaacgccgagggaattcgaactgctcgaccacgcgctcgagaccatgcgccagcagttgcgcaacaagcgtcgggagctggcccgtctaagggccgccaacgaccgaggttatgagcacaacgaagccttgaataccgaaatcgaccgcttgcacaccagtcgcgaacgccttgcaaccctgcgttggcgccgtctggaagcccgtgatgtctatggcagtcatgcccatgctgcccacttggcaccgagcctcaagcgctggttcagccaccgtgaaaatcgggagctgtcgcaggtcgcccgtatccctcccgctctggataaagacagggggagggcgcatacgctggatatcgactcgatcgtctgaccgagcttctacgcaaactccacctgggctggccggcgcgtcatcaacaccttgccgttacggatcgagtacagcggcagaccctggctgcggatgacctcgtagtcgctgtccgccgagaggatcaacaggttggccgggcgtcccggttccaggccgtagcgatcacccagggccatggccttggcgctgttgtcggtgaccaggtcgagcgcgctttgcaggttgcggtagccgagcatgtggcagatgtgcaaaccggcttcgagcacccgcaggatgttgccgttgcccagggggtaccagggatcgacgatggagtcctgaccgaagcacacattcatgccggcttcgagcagttcgttgacgcgagtgacgcctcggcgtttcgggaaactgtcgaagcgaccttgcaggtgaatgctctcggtggggcaggagacaaagctgataccggaatgccccaacaggcgaaacagcttggcgcagtaggcattgtcgtaggagcccatggcggtggtgtggctggcggtgacgcgggcgcccatgtcgcggctgcgggcttcttcggccagcacctcgagaaagcgcgagtgcgggtcgtcggtttcgtcgcagtgcacgtccaccaggcagccggtgcgttcggccaggtccatcaggaacttcaccgaactcacgccctggtcgcgggtgtattcaaagtgggggatgccgccgatcacatcggcgcccaggcggatggcttcctccatcagttcacggccgttgcggtacgactcaatgccttcctgggggaacgcaacgatctgcaggtcgatcaggtgtgtgctttcctcgcgcacttccagcatggccttgagcgcggtgaggtccgggtcggtgacgtcaacgtgggtgcgcacatgctggataccgtgggcggccagggcctgtatcgtcttcttggcacgggccttggtgtcttcctgggtgatggtggccttgcgctcgccccagcactcgatgccttcgaacagggtgccgctcatgttccagcgcggttcgccagcggtcagcgtggcgtcgaggtgaatatggggttcgacgaagggcgggattaccaggttgccggcggcgtccaggtctcccgtgcccaaggccggtactgtcgattgaacggtgatactggcgatccggccatgttccaggtgcagatcatgcaggccttcacggttgcgcaggcgggcgttgatgatgtgcatgggcaagttcctcttggctaaaaacaatcaggcagacagtcgccagatcatcagcgcaatgccaatgtccaggcgatcatatgaattatccagcgtcagcccgcacagggcttcgatgcgctggacacgttgtgtcagggtgttgcggtgcacgcccagccgctgggccgcggccaccaggttaccattctcgtgaaaccaggcttccaggctcggcatcaggttggggccatgctgcgcgtcgtggcgcagcaaggggccgaggcgttcattgaggaattgatcgagcagggcgcgatcacgcacgccactgagcagcttgagtacgcccaattcgtcgtaaacgcacagcccggcgcgctcgctgaaacgccgcgcggccgccagtgcctggcgtgcttcatcctgcgcctgggccaggcgcgccggtgggtgcgcggtggcgctgaggccgataaacaatttgagcggcgccaggcgcaggttcaacgggttgagccagttaaccagttgctggcggttggccaaggcggcgacggcgtccggggccggcagcagcagcgtccattggccggcccgcccaagtaccggcaaccccgccgacacctgacgcaagcgccggctgatagcgtcatgttgccgggccagttgcgtctcgaccgacgccgcgttgccttgggcaaacagcaactcactgccttccaactgcagttgcaccacctgccaatgcccagccagtgacaggcccaattgcatgcctcgatgcagcagcaaatcgagggattggtagtcgccggtcagcaaacgttccagcacgtcgtgccgcgagcgacccaactgctcggactggatcagcgccgagccaatggcctgggtcaccagcaccattttcagcgagtagggctgttcgatcagcggcatgccggcggcttcggcggcctccagcaagtgttggggaatcgcctggatgtacgccggccccgtgaggatcaccagcccggccacctgacgctcgcaggcttcctccagcagttgcatcaagttgtcttcgtcgcgggggtggttgatcccggtgacgaacaccagctcgccgcccaatacccactcggcaatcccgctgttttccgccacgtagggccagcgtacggcgttctccaggccggccgcgccggcgcgcaggcgcatggattccaggcccggcagggccagcacatcggcgatggtcaggctcatgcctgggcgtcagccaagggggcccgcacgcgtagcacggcggtgagcgcgatgtaggtcagcgacgcggcaacgatgcccaccaacggcgcgacccaaggcgagttgaacgccagcacggtgcccaccgcataggccagcagccctggccagttgaatgctggcaggcgtgtatcggccaggcgtggatagtggccgcgatagcggtagaagaagtccgccatgatcaccccgccaatcggcgggatcaccgtgcccagcagaatcaggtacggcaccagcatgtcgtacatacccagcaacgccagtagggtgccgatcaccgcaccggccagggtcacgatcttgcggcgttgggtgcgcagcagattgcagccggccactgcgaagttgtagatggtgttgtcctgggtgctccagatattgagcagcaacatggccatcgccgccatggcaaaaccttgcagcagcaacacttcgaccacgtccggttgttgatagacgatggcgccgtaggcgccgatcagcaccatcaagccattgccgacaaaaaaaccgatcaggctggccagcaccgccaccttggccgagcgcgaaaagcgtgtccagttggtggcctgggtcgcgccgctgacaaaggtgccgaacaccagggtgattgccgtggacaagtccaactcaccggtgggcaccaccgcgagcagcccatccaggccgccgactttcaccgtggccacccacatcgacagaaacagcaggatgcccatggccggaaccgcgatataggacagaatctccagcccgcgataaccaatgtacgccgtggcacagaacaccaggccaaataccaccatcaacgccagcacgctgccctggctgagttcgaaatacttgcccagcaccaccgcggcggtggctgtgccccaggcgtaccagccgatctgggtgaagccgaggatcaaatcgctgagcttgctgcccacttcgccaaagcagaaacgccccatcaacaccgagttcagcccgctcttgaaggcgatgtaacccaggcttgcggcgtagatacccaacagcaggttacccagggccacgacgccgagcatgtcggtgaaactgaacgccacccccagcttgccgccggcaaacatggtcgcggtaaaaaacgtaaagcccaacagcaccatggcggtcgacgccaggcctttgcgcgcatgcatcgggacttcgctaagggggtaatcgttgcccggttcttgctgcgtcatgtgccttgctccctgaatgagtgacgcaggcctattgcaccgtgcgtgccaagccggcagcagtggcgagcgcacgatgggcgctgtgcaccgtgcacagtatttatagccaaacaggtggggaatgccgcaagtaatggtcgccgtgcccaatcgggcacgaaagcggtgcaacagtgatacaaattggatcagtcgaacagcgtgtgggtggtctcgccgcgatggaaggcaaaggccgcctccagatcactttcgatggtgcgcccgcgggacagcggcggcagctcatccaggcggaaaaaacccacttcggtggtctcgaagcctgccatcggtgccgactggtccactggctcgcacaggaagtacagcttgtagaagtcccgcacgtccgggcgatacaagcccttggccttgtgcgtgacgctgtacaacgcccgcgccttcaccgtcagcccggcttcctcgcgaatctccttgacgatgttttccgccgccgacaaaccgatatcggcgtaaccgcctggcaacgcccagcagccatcagtcaactcgcgcaccagcagaatccggtcgccctcaatcaccgcgccgcgcacgtcgatcatcggcgtcgagtaacgctgggcgaagtcgctgaccaacccggtgatacgttccaggggcacattgcccagttgcgcaagcatgctgtgggcaatctcggcaatttcctccaggcgttcacgctcgaaatcatcggtgcagaagtgcaggcccgtggaggccaatgcctgcaagcgtttggcctgggcaagccaggtgttttccatgggttactcctgcaaatgcttggtcatgtacacccgacgcaggccgtgtgcttcggcgcggtgggtctcgacatagccacgccgggtgtacagcgtgatgttctcggtcatggcttcgttggtgtacaggcggatggcggcgaagcctgcgtcgagcgcctgttgttcggcgaagtccatcagccatcgtccgaaacccaggccctgagcctccggggcgacggccaggttgtccagcaatagcgcgccgtcggtaggcagcaggataatgaacccctgaacccggccggcattctccagcacatgcacgccaccggcttgcaccaactggggatagtcctccagcatcggcccgggcttgcggccgatccgcgcgatatacggtgagtaggctgcctggacgatggcctcgatggcagcaacatcatgactggtagcggggcgcatcattgcagcgtgctcttctggaaaatcgatcagtctgctggcgcttcgaagatgccttctataggccgcccgaacaccttggcgatcttgaacgccaagggcaagctcggatcgtagcggccggtctcgatggcgttgacggtctggcgcgacacacccaggcgctcggcgaggtcggcctgggaccatcccagttccgaacgcagctggcgcatcaggttattcattggtagcgccttgtgccgatgatcgtggctacacaccagacgccgcccatgatcggccacaccataaaggccgacagacgcggaaagccagcagtttcaaggaagccgtagctgaaggtcgtcagcgccgtgcacacgaaggccacggccagtgcgtccaactgaatcttgcgacccatttcatccatggcgttcagccgacggatgatcgtaatcgccatcgcgatcatcggaatgacgggcagcaaagccagggcaattttggcggcgccgtcgggcatggacgacacgtaggtgctggaaactacgacgcacacaaaatacgccagcattgtcaccgcgaattccaccaagaagcgtttgaccgacataaccatctccgtgagtaaagggtgctttacattaggcacaggctattgcggtgtcaagggtgctttacatggatgaagggctggcacaaaaaaaccaccgcaagggtggtttttttcatcgcaccggcttactcgccgcgatagatgcaaccgctggtgcaggtctcgtggatacgaatcgcactgagctcaggcagcaggggtttcaactcattccagatccacttggccagtacttcgctggtggggttttccaggccggggatgtcattgaggtagttgtggtcgaggcgttcgtagagcggcttgaaaatcgccttgatctccgagaagtcgcgaatccagccggtatggggatccaggtcgccgctgaggtggattgccaccttgaacgaatgtccatgcaggcgcccgcatttgtggccttccggtacgtggggcaggcggtgggcggattcgaaagtaaactctttgaagatttccacggtattttcagctcggtcaggtatctggcagccggcgagtttaacagcttgattcgttgccgcgcataccgtccctctgtagacgccggcttgccggcgaataaagattgcttgtggcgagcgggcttgtcccgcgctgggtcgcgaagcagccccaaaaccagcagccgaagagtgcctgactcaccgcattcctccttccagggccgcttcgcaacccaacgcgggacaagcccgctcgccacagttgcagtgttcacatttaatcgggtggtcatcccccaaacccctgccggattccggcccgcgtctacaggatctgcagtctctcgcccaatctgccgttatccgccagctccagaaactcatcgcccagccttcggctttcactcatcgcggtctgccagtacttgttgcggctcgcgtcgtcgcccatgaagcgcttgaagtcgctgcggtctggcagtttgccgtggggcaggcgggccaggtagtccctggagggcgccagcagcaacacatcctgcaagccttgctggttactgcgtcgccacggcaggcctttgtcgaaccagccggggatgacccggtcggtgaagtgcgggtacagcacgatgtcatcgccgtggtagggcaggtcgaggtggtagtccagcaggccgccgtcgcggtaggtgccggcgccggcgcccggcaggtcgcgcacgccttgcatcaccatggggatcgaacccgaggccagcagggcttggcgcaggttgcccaggtccaggggcaggaagcgcgaggggaagtccttcagcgcatgcaccggcggcgcctggcgcgggtcgtggatgatcagccgttcgaagtgccgcgacagccgcgcgcggccgcgcaggttatcggcaatcaccgatgacaggcccagcccgagccgtccgcgatggtcgtcggccagcaggccgtggctcttgaccaccatgatgttcaggcggtaattcgggttgtccagcacccgcgcatcgcgaccggcgagcaagtcgtcgagcatgcgctggcagctctggctgacctcggccatggtcacgcctttggcaaagcgctgttcgttgtacaggcggccgaggtccagcaggccttgcaccgggtcgggcaggcacgcgctggcaaaccgccaggagccgatggaggcaccgatcagggcgcgttcccgtggcgcacggggcagccagtcgccgaacagcgccaggtccaggccctggatgccgagtgccttcgggccgccggccgcgccgggcaggatgcccacctcggcaggcgtgaggccttgttcacgaatgcgcgcaaaggcgcgtttgccggccttgagggtcagggcgggaaacttgatgtggatggctgtcataccggtctctgtccgagcgagcggggcattatagaaaatctcgtggaatgtagggcaaaggccttggcgggaattgccatggtggcaattcagtttcagttaagttgcagggcgtacggtggccggcgtagtaaaacatcctgtaacggagacttatcatgaagcgcctcaccgcgctggccgccgccggtatcatcgccttcacggcgacccaggcccgagccgtggaccccgacaaaccactgaaagtgccggccactgttactattgtcgctttcgatcaactggaagctacggccctggccctgcatcccggttcgacattgctggacaccgacctcgacgaggcctacggcaagtacgtgtatgaggtcgagttggaagatgcccacggcatcgaatgggacgttgaattggacgcgctcaccgggcaggtcctcaagaatcatcaggatacgtaatgaaggtaaatttacgcgtcggcagtcgagtggcgctggtgctcttggcattctgctccagcctggcggcccgcgacctcaaccaggatgaagccttggcgctgcgccagcagggggtgatcctgccgcttgagcaattgttgcagcaggccatggcgcgttaccccggctcgcgcctgctggaggccgagctggagaagaaacacggccaatatgcctatgaagtggaactggtgaccaccgaaggtgtggtgcgcgagatcaagctggacgcgcgcaccggtgtgttgatcaaagacgaggaagactgatgcgcctgctgctggtggaagacaacgtacccttggccgatgaactgatggctggcctgcagcgccagggctatgccgtcgattggctggccgatgggcgcgatgccgcgtatcagggccgcagcgaaccctacgacctgatcatccttgacctcggcctccctggtctgcccgggcttgaggtgctggcgcaatggcgagccgccgcgttggccgttccggtactgatcctcaccgcccgcgattcctgggccgagcgcatcgaagggctcaaggccggcgccgacgattacctggccaaaccctttcaccccgaagagctgcacttgcgcatccaggcgttgttgcgccgttcccacggccaaaccaaccagccgacgttgcaagcggccggcctgcacctggacgaaggtcgccaatgcgtgctgcgtgacggcgatgagatccagctgaccgccgccgaatttcgcctgttgcgctatttcatgctgcaccccgaacagatcctgtcgaaaagccacctggccgagcacctctacgacggcgagaccgagcgcgactccaatgtgctggaagtgcacgtcaaccatctgcgccgcaaattgggccgcagcgtgatcgagacccggcgcggccagggttaccggtttggcgccagccctgcatgaggtcgatccagcggcgcctgagcctggggctgatcagcgtgatggtgatcgtcggcgtggtgttggcccagaccagcctgtggttgttcgaggccggcttgcagcgctacctggaagctggcttgcgcaacgacgccgaaaacctgctggtggcgctggtgcgtgggcccaacggtgtgcagctggatgagcaacgcctgtcgccagcctatcaacggccgttttccgggcattacttccgcatcgattttgccgacgtccactggcgctcccgctcattgtgggaccaggaactgccgcgcctgcccgaggcggggctgaagggcaacctgcaactcggcccagaaggccagcaactgctggtgctgcgtgcggactacaagcggtttggccaatcgatttccatcagcgtggcccaggactacaccccggtgcgcgaaagcttccggctgatgcgccagatcggcctggtgctggggctggcggcactgctgttggtgttgatcttgcaacgggtgaccgtgcgccgcgccttgcgcccgctggaaaccgcgcgcaaccagattgcccagttgcaacaggggcaacgctcgcaactcgatacccaggtgcccctggaactggagccgctggtggcgcagatcaaccacctgctggctcacaccgaagacagcctcaagcgttcgcgcaatgccctgggcaacctcggccatgcgctcaagacgcctttggccgtgctgttgagcgcggcatcgagcgagacgctcaggcagcatcccgaactgagcaaactgctgcgtgatcagttggagcaggtacagcaacgcctcaaccgcgaactcaatcgcgcccgcctggccggggaaaccttgcccggtgcgttgttcgactgtgataaagaactgcccggcctgctcgccaccctgaccatgatccacggcgagcacctggacctgagctaccgcgccacgccgggcctgcaactgccctgggaccgcgaagatctattggaactgctcggcaacctgttggataacgcctgcaaatgggcggatgccgacgtgcgcctgagcatcaccgagacggagcaccattacctgttggcggtggaggatgacggccccggcattcctgaaagccagcgagcccaggtgttcagccgtggcgcacggctggacgagcagatcgatggccatggtctgggcctggggatcgtgcgggatattgtcgaggtgtggggcggggtgttgcagttgcaggcatctgaactgggcggcttgaaagtgctgatcgaattgccctgtgggagggggcttgcccccgatggcggtattccagtcaaaaaacagattggctgatacaccgcaatcgggggcaggctccctcccacattggatcgccttgcattttcagacgcggaactgatccatcaacccctgctgctgattcgccaggctgttcaacgcctggctcacccgcgccgattcattcgcctgctcggacagcgactcggtcacatcgcgaatggtcgccacgttgctgttgatctcctcggccaccgcgctttgctcttcggcggcgctggcgatctgcaggttcatgtcgctgatcaccgttaccgcatcgccgatctggcgcagggcggtcacggcctgtccaacctgttcgacgctgccctgggcctggcggtagctgttgcccatggaaccgaccacttcttcggtaccgctctgcaactgctcgatcaccaggcgggtttcttccaccgactcctgggtacggcgcgccaggttgcgcacttcatcggccaccaccgcaaagccacgcccggcttcaccggcgcgggccgcttcgatggcggcgttgagtgccagcaggttggtctgctcggcgatgccacggatcacctccagcaccgagccgatcttctcactgttggcggccaggccttcgacctgggtcatggccgtgctcatgtccgccgccagctcgccgatgttggtggtggtgcggtcgatcaccgtgaggccgtcgcgggtggcctggtcggcatcgcgtgcggcctgggccgcttgtgccgcgctgcgggccacgtcctgggcggtggcgctcatttcgtgggaggcggtggccacctggtcgacctggcggtactgctgctccatgccggcgctggtttgcgtggcaatcgcggcggattggtcggcggtgccacgagcgtcctgcaccgagcgtttgacctcggcgatgatcggctgcagcttgtcgaggaaacggttgaaccagccggccagttggcccaattcgtcctgtttgtcgtaggccaggcgccgggtcaggtcgccttcgccgctggcgatgtcttcgagcatgtgcgccacgccgaggatcggccgggtcacactgcgtgccatcaaccacaccaggatcaagccgaccacggcggccagcaggcccaggctcagttccagcagggtgcccttggcattgtcggcatccagttgggttttcagcgcttcggcgggggctaccaggactttctctggcacatccagcagcacgccccacggcttgccgtccggaatcggtgcgaacggcgcgagcaccttgagctggtgatcggtgcgcaggctgcgaatttgtgtactgccggtcagggcgctgatcaactgcgcgccgttggcggtgtcgacctggtccaggcgctggctgagcttgctcgcgtcggggctgtagccagcgagcaaaccagtcgggctgaggatgctgacctgggtctggccgtcatacagcttgtggctggcctgctggctcacggcctgcaggctgttgaggttgatgtccaccgacagcgaggcgatgactttgccgttggccatcaacgggaagacaatgctggtcatcagcacgttttgtccgttgatcttgtaaaagtacggttcgattacgcacggcttgagcgtggtgcgtgggcaggtgaaccaggcgttggccttttcgccgctggggccgatgctggtgtcggacatgtcgctttccggcagcgacatggaggtcaactggccaggcgtcggttgcgaccagtagagggcgaaacgccccttgtcgttactgcccaactccgcctggccggcgaacagttcatccttgccgtccagcgcattggcttcgaataccagggacaaaccaagcaagtccgggttggcctgcaacgcggccctgacctggcgggtcaggtcttcgcgggtgtcgaaggcgtcgagaaagcgcttctcggcctgctcgcgcaggaacagcacctggcgcgaaaaaccatggccgtactgataggcgtccatgaactggcggcggatacccagcgcttgcacctcgccctgggcttcgatgcgcgcctgggccgcttcatccagcatctgcatgctggaggccttgacccgttgcgaactctgctccatgcgatacagcgacagacccaccagcagggtcacgattcccagcaggcacaagccagcgagcagggtgattttccattgaatggagagctgcctgagcgacatcggtacatccttacctgaaaacacagagagaacctgtatcggcggtttcaggtttttctttattcaaacgatcgatttaaacctgaaagcggcgccgttttttgacatgtgcgcctgcctgctgcaaagtgcgcgccctctaataagacctcctccaagcctgcacgccggttgccacccaatggctgcccgggtgcgggcatgcctgttttttatgtttttttcttgaggtaaccatgattaacgcagtcattgccgcggtcggcaccatgctggtgctcagcctgtcccgcgtgcatgtggtcatcgccatcatcgtcggcgccctggtgggcggcctgaccggtggcctggggatcgaagccacgctcaaggccttcaatggcggcttgggcggcggggcgacggtggcgttgtcctacgccttgctcggcgctttcgccgtggcgattgccaagtccggcctggcccacgcgttggccgacaaggccctgctgctggtggaccgtcaggaaaccagcggtggcagccacgtcaaatggctgctgatcggcctgctgtggatggtggcgattgcctcgcagaacatcttgccgatccacatcgcgttcattccattgctggtgccgccattgctgtacgtgctgaccaagctgcaactggaccgccgcctgatcgcctgtgtgatgaccttcggcttgatcacgccgtacatgttcctgccggtgggcttcggcaatatcttcctcaaccagatcctgctggccaacgtggccaagagcggcgtggatatcagccaggtcaacgtcactcacgccatgagcctgccggcgctgggcatggtcgtcggcctgctggtggcggtgttcatcagctaccgcaagaagcgcgtgtacgatctggagaaaatcgagcgggtcgagcaggtggcggtgcagtacaacccgctgaccctgctggtggccggcctggcgattgcctcggcgttcatcatccagttgtggctggactcgatgatcatcggcgctctggccgggttcctgatcttctcggtgtcgggcatcgtgcgctggcgcgacaccgacgacctgttcaccgaaggcatgaagatgatggcgatgatcggcttcattatgatcgccgcgtcgggttttgccgaagtactcaaggccaccggggatgtgcgctcgctggtggaaacctcggcggccttcatcggccatagccgtggggtaggggcgttgctgatgctgctggtagggctgctggtgaccatgggcatcggctcgtcgttttccaccgtgccgatcctggcggcgatttttgtgccgctgtgcgtgcaactgggtttcagccccatggccatcgtgtgcatcgtcggcacggccggtgcgttgggtgatgccgggtcgccggcctcggactcgaccctggggccgacttccggcttgaacatcgacggccagcaccaccatatctgggacaccgtggtgccgaccttcctgcactacaaccttccgctgctggcattcggctggctggccgcgatgaccctctgaccgcagcgcccttgttgtggtgaatgggcttgctgtggtgagcgggcttgctgtggtaaatgggccgttgtggtgagcgggcttgccccgcgttgggcggcgaagccgccctaatccagccaccgtgatgtatcagaaaaaacgaggtgcctggatttggggcggctgcgccacccagcgcggggcaaggccgctcactacagaaacctcctacgcggccgttaacctctctagtcgccactaataagagagaaaacccatgcgtctgagcctcaaggccaaagtcctgtccctcgccgtagtgccggtgctgttgtttgccgtggtcatcagcctgaccaccgtgtggatcctgcagggccaggcgcgcaatgaggtggaagaaacccgtcagcgcctgctcaacgacgccaaggccaccctgcaaagctacgtcgaagtggccatgaccaccatcaagccgctctacgacgcggcggcgcccggtgataccgcggcgcgcgccgaggtggtcaagctgctgtccaacaccagctacggcaaggacggctacttcttcggctacgactccgagaccatccgcctgttcaagggcaacagccccgacggcgtgggcaagagcttcaaggataaccgcgaccccaacggcgtgtacgtcaatcgtgacctggtcaaggtcggcaaggacggcacccattacctgcaatacagctcgacccaaccaggccagaccgaactggtgcccaagatgggttacaccgaatacctgcccaagtgggacatggtcatcggtacctcggtgaacctggacggcatcgaagcccaggtggcggtggtcgaggccaaggtcgagaaacgcatggaaggcgtgctgctgagcatcctcggcgtggccgtggtggtactgctggtgatcgctgccgtgggcatgctgctggccaataccattttgcgtccgttgcacctgatgaaagccaacctcgacgacatcgcggccggcgaaggcgatctgacccgccgcctggccatcaccagccgggacgagctgggcgatctcgcgggtgcgttcaaccgatttgtcgacaagatccacggcctggtgcgccagatcaccgagatgacaggccaactcaccggtctggtcagccaggtgtcagaccaggcccagcgctccgaacaggccatggaacgccagcgccacgagaccgaccaggtcgccacggcgatcaaccagatgtcctccgccgcccaggaagtggcgcgcagtgcccagggcgcctcggtcgcggcccagcagaccgacgctgaaggtcaggccgccaagcgcgtagtggacggcagcatcgcgcagatccatgcgctggtgaacgacatccgcagcagcggtgtgtccctcgacagcctgcagcaggacgtggcctccatcgtcagcgtgctcagcgtgatccgctccattgccgaacagaccaacctgctcgcgctcaacgccgcgattgaagccgcgcgggccggggaggccggccgtgggtttgcggtggtcgccgacgaagtgcgcgccctggccagccgcacccagaccagcacccaggaaatccagggcatgatcgaccgcctgcaaaaaggcactgaagccgcggtggacgccatgcgccgttccagcgatgccggcgacggcacctcggcccaggccaaccaagccggggcatcgctggacaccatggcgcagttgatcggcaccatcaattcgatgaacgcccagatcgccagtgccgccgaggagcagaccgccgtggccgaagagatcaaccgcagcgtgcatcagattgccgtggcggtggacagtgtggccgatgagacccaactgggcgcccagacctcccgcagcctcgcggacctgggtcagcgcctggggcagttggtcggccagttccggatctgatccagcggttgtgcgccgcgacgcataggcggtgtcacgtcatctggatcagcgtcttcatgatcgtgctttcggtggagatggttttcgcgttcgcctggtagttgctctgggccttgatcaagtcgaccagttcgttggtcaggttgacgttggagttctccagggcattggccttgatcgcgccgagggtgccggcttgcggggtgtcatagcccggttggccggaggcgaacgtctctctccaggcggtgccgccggccggttgcaagccttgttcgttgttgaagctggccagggaaacctggccgacggccttgctctgctggttgctgaaggtggcgaatagcacgccgttgccgtcgattttcaggccggtgatctggccggtggcatagccatcggtgaccggcgggttacggtagctggccgagttgtactgggtgatgttggccaggttgacggcgatgccggttgggttggcatccgcaccgttggccttccacacgccgttggtcaccgtcccggggacccagccggtgagggtcagggtcttgtcggatacgcctgcggttacgacgctggtgagcttgcccgcgccgtcaaaggtcaacgtggacggcaccggtggcgtggacggtgtaccggtgggcgccgagccgttcgggttgcgcccgtcgatcagggtgtaggcgttccatttgttgccgtcggttttcaccaggtactgcaccatcgggtgggcattgccctgggagtcatacagggtggtgctgtactgggtgctgaaggtgctggtgtcgttcgggttgaacggcttggccacctggtcgatcacgggcatcgacgcattcaggttgctggtcgaatcgactttggtcgacgccttgggcggcaggctggccaggttcaattgcaggtcgaccaggccgcccttggcgatcttgccgttggcgtctgccccgtagccttgcaggcgcgaggtgccggtgttgttggtgatgtagccgtccttgtcggcgcggaaggcgccgctgcgggtgtactccagcgaaccgtcgcttcttttctggacgaagaagccgccgccctggatacccatgtccaacgtaccgccggtggtgttgacgtcaccctgggtgaaccgttgggacaccgccgccaggttcacaccgttgccgatgctgttctggccggtgcccagccgggtggcggcgtagatgtccgcgaattccgcacgggatgccttgaaaccgctggtcgcgacgttggcgatgttgttgcccgtgacgtccatctgcttattggcggcgtggagaccgctaaggccaatattgaaagacatatcaactccttctggtgccgtttctggtcgaggctggggaagggctgagtgtgcgcaccgcgcatggacgttcgggggaggctgtgtggagaaagcatggaggccgggatttatttacccggcgccccctcagagatcgcgcatcaataggccgaaacgcaggtccatcgcggccgggagtggcaggtacacggtgtgcccatcccccggtgcgacctcgatggcgtggcccttggcgttgtgcagggtggccaggtcgaagtggaagttaccggcgggcgtcatcaattcaaggtgattgcccacggtgaagcgattcttcaccttgacctcggccagctcgccccggcgctcgccggtcagttcgccgacgaattgctggcgttccgacaccgagctgccgtgctggtagttctggtactcatcgtgcacgtgccggcgcaggaacccttcggtgtagccgcgttgggccagggattcgaggtcggccatcaggctgcggtcgaaggcgcggccggccaccgcatcgtcgatggcctggcgatacacctgggtggtgcgtgcgcagtagaagtgcgacttggtgcggccttcgatcttcagcgagtgcacgcccatgtgggtcaggcgctccacgtgctgtaccgcgcgcaggtccttggcgttcatgatgtaggtgccgtgctcgtcttcgaaggctggcatctgttcatcggggcggttggcttcctgcaacagaaacacctggtcggtcggcgcgccgatgcccagggtcggctcgcagtgctggacgatatcgccggtggcgttttccaccgccggtgtggcctggtatttccagcgacacgcattggtgcaggtgccctggttggcatcgcgcttgttcatgtagcccgagagcaggcagcgcccggaataggccatgcacagggcgccgtgcacaaacacctccagctccgtggccggcacctgttggcggatttcgtcgatttcttccagggacaactcccgcgacaggatcacccggcagatcccttgctgctgccagaactcgacgctggcccagttcaccgtattggcctgtaccgacaggtggatcggcatctgcgggaagtgccggcgcaccagcatgatcagcccgggatcagacatgatcagcgcatccggacccatggcgatcaccggggccaggtccttgaggaaggtcttcaacttggcgttgtgcggcgcaatgttcaccaccacgtagaaacgcttgcccagggcatgggcttcctggatgccgagggccaggttggcgtggtcgaactcgttgttgcgtacccgcaggctgtagcgcggttggccggcgtacaccgcatcggcgccataggcgaaggcgtagcgcatgtttttcagggtgccggcgggggcgagcagttcgggggcgaggatggaaggcatgggcacgggtcgcaaaaggtcgcgaaggtagccgagcggcgagggcggttcattgatccaggtcgtgctttgcgcatttttgtatcgctgtgtatcgacggcggctgtggatacgtatcgatttatccgcgcggttttccgacacaggtgcgatacctcatgcggtcttaatgggcttcccgtatccataaggtgatcaccatgctcttcgtcgcattcctgggcggcatcctgaccgttctcagcccttgtatcctgccggtggtgccgtttctgttcgccggcgtcgaccgcagtcgccgttcgatcctgttgaccctcggcggcatggcgctgaccttcgcactgatttccagcctggcggtggtcagtagcgaatgggtgatacaggccaataacaccggccgccatgtggcactgatcgtgatggggctgtttgcgctgtcgctgatctcggcgcgtgtcggtggctggctggcgcggcccttcgtgttgttgggcaaccgtatcgatcctggcaatcgcacgctgtccggcccgctcaagtcgctcatgatcggtgtcgccaccggcctgctgtgggcgccatgcgccgggccgatcctgggggtgatcctgaccggcgcgatgttgcaaggcgccaatgcgcagaccagcctgctactggtggcctacgggctgggcagtgcgttgtccctgggcacgctgatttttgccgggcgtggcctggtcaatcgactcaaggcgtccattccgctgaccggttggctgcgccgtggggcaggggtggcggtactggcggcggcggtggtgatttccaccggagcggacaagaccctgttcgctggcacatcgtccgaaggggttagcagcctggaaaaaggcgtgctggaaaacgtgcccaacgtggtggattacgtggtgagcaaggtcaaggccgatccgcaggacaatgcacggggtgccatgccgtcgctgggcggcgcggtcgagtggctcaattcacctgaactgacccgcgaatccttgaaaggcaaggtggtgctggtggatttctggacctacgactgcatcaactgccagcacaccctgccgtacgtgaaggcctgggcgaaaaagtacgcgcaggacggcctggtggtgatcggcgtgcataccccggaatacggctacgagcgcatcatcggcaacgtcaaggagcaggtgcgcaagttgggtatcacctacccggtggcgatcgacaacaactatgcgatctggcgcagcttcgataaccagtactggcccgcccattacctgatcgacgccaacgggcaggtgcgcgacacgcattttggtgaaggccggtacgaggcccaggagcagatgatccagacgctgttgaatgaggccaaggccacgcagtgatagggtctacgcttgttcgatcaccaacggcactcccaggaatcgctgcggactaagcaacagggccgataccggccctgtgcttttctgacatggaccggacatgaatcaaaccaacctgcaattcaagaccctgctgttgttgctgggcctggtgaccgtcgcgtttatctggatattgctgccgttctacggcgccgtgttctgggcggtaatcctcggcattatttttgccccgatgcagcgccgcctgcagcagcgctttggctggaaccgcaatttcacttccctggcgaccttgagtgcctgcctggtcatcgcgatcctgccggtgatcatcaccagtgccttgctggtgcaagagggcgcgacgctctacaagaacatcgagagcggcaagctggatgtggccgggtatatcgagcagttcaagaacgtgttgccgccgtacttccagcacctgctggaccgcttcggcatgggcaacctggagggcctgcgcgagaagatcgtcaagagcgcgatgcagggcagccagttttttgcgacccaggcgttcagcttcggccagggcacgtttgatttcctggtgagctttttcatcatgctgtacttgctgttcttcctgctgcgcgacggtccggagctagtgcgcaaggtgcgcacggcggtgccgctggccgagccgcagaagcggcggctgcagctcaagttcaaccgggtggtgcgcgccacggtcaagggcaatgtgctggtggcggtgacccagggtgccctgggcgggctgattttctggttcctggacattcccagtgcgttgctctgggcggtgctgatggcgtttctgtcgttgctgccggccgtgggcgcggggattgtgtggggcccggtggccgtttacttcctgctgagcggtgcgatctggcagggcgtggtgctggggctgttcggcgtgtttgtgattggcctggtggacaacgtgctgcgcccgatcctcgtgggcaaggacaccaagatgccggactacctgatcctgatctcgaccctgggcggcctgtcggtgtttggcctcaatggctttgtgatcgggccgctggtggcggcgctgttcatgtccagttgggcgctgttcgtggagagcaagccgcgagtcaaactgccactaccctgaacatcaggcgtggagcttgaacgtcgaggtgtgttgcagttgtttttcggcatcggacagggaggtcagtgggccgctgatggcttccccatcgcgtaccaggtaccagcaggcgagcagacccagcttgcgaagcggggcggggacggcgctgccgatgacggacatgatttgtacagtgggcataaagacctccaatcgctgttgggggcactttacggcgcaggctggcgtaggaaaaatcaactgtctcgatagtcgacatcgacgcgaggcgtcagtccacgacctgatcaagcatgttcaccacttcctgctcactgagcagccccttgcgcaccaggttttccgcgagcaacgcgaggaacttggcgctgcggtggccttccaggtgcttgagttccgtgagggcgctgtagaccttgctggacgtacagaggccggcggtgcggtgcgggttttgcgtgggcatggtcagtcgtccttgttgttattgggtggacaatctcgatagtgggagtgtttcgtgacacaaacatgacagcgcaaggcctgttcgggcaagtagacattggtgttgatgatgtgcgattacgcgctgggcattgtccccagagcgaccttgacgccctgaatccggactttccaggcaaaaaaaggccccgcaatcacgcgaggcctgtttcgaacgatctggttaccagccgcggccatagtaaccgtgaggagggccgtagtagccacggggcggaccgtaatagccacgcggtgggccgtaatagaccggcgccgggcggtagtaaacctgttgctgcacatacaccggcggtggcggtgcgtaataaaccggcggcggcgcggcatataccggttgcggttgcacatacaccggctgctgcacatagacctcacgcggctggctggcaaccacggagcccacgacagcggcgccgactaaagcacccaatacggccgggccaccccaaccaccaccgtgggcggaggcttggcctgccatcgcgagtgcgccaaccagcaaggcgatcttggggattgtacgaatcatggtcattcctcggttagccccagcgcttgtggtctgcaatcaatagactcaagtaatgtcgcggggatacttttaagacaacgtatttctgaaaaacagcacggccgctaggtaaaggttgtgtaaggtctgtaccgatttgcttactcaaaggagttacccatgcagatgcaccccaacaaggacacccaactgtgcatgtcgctgtcggcgcgccctgggaatttcggcctgcgttttcataaccatctgtacgaacagctgggcctgaacttctactataaagccttcagcagccgggatttgcccggcgcgattagtggtatccgggcgttgggcgtacgcggttgcggggtttccatgccgttcaaggaagccgccattgccttggtggacgaactcgacgattcggttcaagccatcgactccctgaacaccatcgtcaacaccgacgggcacctcaaggcctacaacaccgactacatcgccatcgagcagttactcaagaagcatgcggtgccaaaggactcgaccttcgccctgcgtggcagcggcggcatggccaaggccgtggccagtgccttgcgcgatggcggctacgcccatggcgtgatcgtcgcgcgcaacgagactgcgggccgggcgctggcgcagaacctggggtatgaatggcgggaggaactgggcgacctgcgcccgcagatgctgatcaacgtgacgcccatcggcatgacgggcgggcctgaggcggatgcattggcattcgacgccgatgcagtggattctgccgagacggtgttcgacgtggtggcgatccccgccgaaaccccgttgatcgtgcgtggacgtgcccaaggtaaacgcgtgattaccgggcttgaagtgattgcgatccaggcgttggagcagtttgtgctctataccggggtgcgaccgacgccggagcagttcgccaaagccgtggcgttcgcccgaacctgaagaaccccgaatatcatatgtgggagggggcttgcccccgatagcggtagctcaacaatgaaattattgactggcacaccgtcatcgggggcaagccccctcccacattttttccgcgttacagcggttccaatttggccagccgctcttccaacagtgcaattcgcgcttcgagttcttcgatgcgttcgacagacacgccactgacacccccgcgctccatcggattgccccgcgccgcgatgatcgcctcgatatccgccggatcgcccaatgcatgggtataacgatcttcacgctgccccgcctggcgcggcaccagcaacgccagcccccgcgcaatcaggcgttccagctggtgcacgacctgctcggcatcttcaaaatcatgcatgcgcccgctgcgcgtcagcagttcattgacggtttgcggcccgcgtaaaaacagcagcccggtcaggatcacctgggccggcaccagttccagcgccttgtctacacggtgttcccagcggtcggcacggctgcccatcaccaggcgggtgaaaccctggccttcgagtgcgcgcaggctctggccgacctggcccggactcaggttcatcaccggctcgcggctggtcttctggttgcaggccagcaccagggcgttgagggtcagggggtaggtttccgggttggtcgcctgtttttcgatgaggcagcccaggatgcggatttccgtgctgttcaggcgcggctcaggggtgtcggtgtcgtgctcggcggtcatcgcgcgttccctatgcagtggaggtccttagcctaagccggaaaaaataaaagacaagcgcccggcatgtctataatcgccgctggttcaaaccgtgccataaccatgagactgccatgactatttccctgtacgccgcctccatcccggtcttcaagcaaatgctcaccgccctgagcggtgtattgaccaaggccgaagcccacgccagcgccaagaacatcgagccgaacgccttgctgcaagcgcgcctgttcccggacatgttccaactggtgcgccaggtgcagatcgccgtcgacttcgccaagggcgtttccgcgcgcctggccgagatcgaagtgcctaagtacgaagacagcgaagtgaccttcgccgacctgcaagcgctgatcgccaaggtcctggcctttgtcgacaccatcacccctgagcagatcgacggcaaggaaggcatcgagatcatcactcgcccaggcacgccgaaagagaagcgcttcagcggccaggcctacctgctgacctacggcctgccgcagttcttcttccacgtcaccaccgcttacgcgctgctgcgccataacggcgtggaagtgggcaagcgcgattacatgggcgctttctaagcacgcataaaaatctatggtcacccccatttttgcaatactgattaacgggtggtgtggttggcttgcttaaatctatccggcgtctgtttggggcttgccccagcgccacgatgagagtc

SEQ ID NO: 34 - DNA, 304219 bp, Pseudomonas nodulensis
  misc_feature (190289)..(190364): n is a, c, g, or t
  misc_feature (280275)..(280275): n is a, c, g, or t
  misc_feature (280282)..(280303): n is a, c, g, or t
  misc_feature (280312)..(280312): n is a, c, g, or t
tatgtttgccgagatcgatcccgatcagtgctgactcgctcatgatgatggcctccgaaaacaaaacaccctgtgaaagcgtagccctcacagggtgttgggggtgaccatctcattaaccggggcggttcttgtaggaaccgtcccggtttttttgtgcgcgacggttaagccggctgttcttccttgcccaggcacgcggcggcggtgaacaacacatcggtggacgaattcagcgcggtttccgccgaatcctgcaacacaccgatgatgaaaccgaccgctaccacctgcatcgcaatctcactgggaatgccgaacaggctgcacgccagcggaatcagcaacaacgaaccgcctgccacgccggaagcaccgcacgcacagatggccgcaaccacactgagcagcaccgcagtgggcaggtcgacggcgatgcccagggtgtgcacggcggccagggtcaacacggtgatggtgatcgccgcgccggccatgttgatggtggcacccagtgggatcgacaccgagtaggtatcttcatgcaggcccaggcgtttgctcagcgccaggttcaccgggatattggctgccgaactgcgggtgaagaacgcggtaatgccgctctcacgcaggcacatcagcaccagcgggtaagggttgcggcgcagtttccagaacacgatggccgggttgatcaccagcgccacgaacagcatgcagccgatcagcaccaccagcaggtgggcgtagccgagcagggcaccgaagccggaggtggccagtgtggaggcgaccaggccgaaaatgcccagcggtgcaaagcggatcaccacgcgcacgatcagggtcacaccgttggacaggtcttccagcaccgcccgcgtggtcggcgcggcgtggcgaatggcaatgcccatgccgatggcccacgccaggatgccaatgaagttggcattcatcagcgcgctgatcgggttgtccaccacgctcagcaacaggctctgcaacacttcgccgatgccgccgggcgcggtcaccgctgcgtcatgggtcgccagcaccagcgaagagggaaaccacatgctggcaaccactgccaccacggcggcggcaaaggtgcccagcaaatacaggaacaggatcggcttgatatgggtttcctggccatgcttatggttggcaatggatgccatcaccagcacaaacaccaggatcggcgccacggccttgagcgcggaaacaaataccttgccgataaacccggtggagcgtgccacttcggggagcagcagggccaacaggatgccggcgatcaggccgatgacgatttgcgtgaccaggctgacgcgggccaggcgttgcaggagagagggggcagcagtcataaacacttgtctctagtttttttagggcgcagctactgactcggaaagggctgtaggacgcggatcgcgaagtctagcatgctgtgggaaaagtccttggcggtgcggcattgcgtcacccgcttgcccaggccttggccaaatctggacatactctgataagattctgttctctcatctttcctctccgtcagcgggcccttcgggttgtcgttgatgtcgtcgtttctggagttttcatgttgtttcccatcctgctgctgtcagccgccggctttaccgtgctgaccacagaattcgtgatcgtcggcctgttgccgtccatcgcccgcgacttgaatgtcagtgtgtcccaggccgggctgctggtgaccttgttcgcgtttaccgtggcggcgtttggtccgtttctgacggcgtactgtgcacgtttcccacgcaagcgcctgtttatcagcatcctgatcctgttcggtgtggccaataccgtggcggccctggcaccgaacatctgggtgatggcgctggcacggttgatcccggcgctgggtttaccggtgttctgggccctggccagcgaaacggcggtagacatcgtcggccccgaattcgccgggcgcgccatcgagaagatcggctttggtatcgtctgcgccacggtattcggcattccggtgggcacgctgatttcagatatgttcggctggcgcagcgcgtttgccatcctcgcggtgatcgcgctggccaaggccttgctgctgtctatctacctgccggtgacccagccgaagaacgatgaagtgacgttgcgcgcgcagttcaagatcctgcgcaacccgctgatgcaggggcatatcctgctgtcgatcctggtgttcagcggcatgttcacggcgtacacctacctggcggacatccttgagcgcctggccgggttcgacggcacgctggtgggctggtgcctgatgggcttcggtgcggtcggcctgatcggcaattcgctgggcggacgggcggtggatcgccacccgttgatcgcgtccatggtgttctgtgggttcatgatcgccggcatggtcgcgctggtgccggcgattcattcgagcatcggcctggcggcggcgatggccgtgtggggcgtaacccaggcggcgatgttcctggtcagccatgtgcgcctgatgaaggccgcgccccatgcgccagcgtttgctgcgtcgctgaacatcgccggggccaacctgggcatcggcctaggcgccatggtcggcggccatgtgatcgacaccctcggcctgggcagcctgggctttgcggcgtccgggtttatcctggtgtcgatcctgctggcgttgtggctgatgaccgccaagcaaccgctcacctccggcgcctgagccgtcagggcagggtggtgaatagctcgcgccgggcaccttcggtaatcgccacgatgccggggtgcttgaccttgcgttccaccgagatcgcgtagaacgactcggtcacggccacggtttggccgatcagcgccacgccgtactggcgcaccacctcgtcggcaatcacgctgggggcgataaagatcccgctgccggattggccgaatgcctgcatcaaggcgctgtcgtcgaactcgccgatgatcttcggttgaatctgttgctcggcgaaccagcgctgcaaacggctgcgtaccacggtttccgcgcccggaatcaatagcggcgcgccgtgcaggcactgcgggaaatcccctccgtattcgtcagccagggcctgggtggcgaaaaagctgatgccacattcgcccaacttctggctgtagcccttgatgtctaggtgcgtgggcatggggctgtcggaaatcaccaggtccaggcgctggattgccaggtcggccaacaggcgttcgagtttgtcttcgcggcaggtaatgcggatcggctcgctcaactccatggtcggtgcgatcagccggtagacgatggacttgggcaccacgtccgccacgccgacgcggaacaggatctgctgttcgtcgggctgcgcgcgcagcatcgcctccaattcattgccggtctggaacatctgctcggcatagggcagggcctggcgcccggcttcggtcagttccagctgccggccaacgcgctgaaacagcgcgataccgaaggtttgctccaacaggctgatctgcccgctgatggtctggggcgtgaggttcaactgctcgcacgcacgcacgatgctgccggtcttggccaccacccagaagtagtgcagttgtcgataattgagcatgctcaccatcacatcgtaaaaatcgaagtatacgcgagaaaaatacgaattttactgaactgtttgcctgcatagaatgcctcgctatcgcggggccactatttggacccaagagttctaacgaggaagacatcatgaaactcaattctctgggcgcggcatccttgcttgcgctttcattggtagtggtcagtggttgtgatcaggtcgagaaaagcgcacagcaggtgttgggcaaggccaccgaatcggccaagcaagcgatcgatgacacccacaaggctgccgaacaggcattgagtgaagcgaccaacggcctgatcaacccgcagaagaaggatgatcaggaagagaacgaaaccgaatcgaacagtaaagaagcctaaattcccgctcaacgtcaggactgacctatggattaccttttacaactggccgccagccccaccgcctggattgccctggcaaccttgatcgtgatggagatcgtgctgggcatcgataacctgatcttcatctcgatcctcaccaacaagttgccagaaaagcatcgggccaaggcgcgacgcatcggtatcagcatggcgttggtgttgcggttgggcctgctcagcaccatcgcgttcatcgtgcaactgacggcgccggtgttcgaagtgttcggccaggcgttttcgtggaaggacatgatcctgatcgccggtggcctgttcctggtgtggaaggccactaccgagatccatcacagcatggacccggagcctgaagagaaggaaaccaacgccggcaacgtcgtggctatcggctttgccgcggccatcgggcagatcctgttgctcgacctggtgttctccatcgacagcatcatcaccgccgtgggcatgaccgagcacttgccgatcatgatcattgccgtggtgacctcggtgatcgtgatgctggtggcggccgaaccgctggccaagttcatcaacgacaacccgaccgtggtgatgctggccctgggcttcctgatcatgatcggcatgaccctgatcgccgaaggcttcggcgcccatgtaccgaaaggctacgtatatgcggccatggcgttctcggcagccatcgaatgcttgaacattgcccggcgtaaccgccaccagcgtttgctcgctgcccggcagtaaccgctgaaaccaaacggccggctgcgctcagatgagtccagccggctttttgctgtctgttagaattcgcgcacttgatagcgtgaggtcctacatgaacgagccgattcgtcttacccagtacagccacggcgcggggtgtggctgcaagatatcgccccaggtgctggaagtgatccttgccggcagcggcgcacagaacctcgaccccaagctgtgggtgggcaacgcctcgcgtgacgatgcggcggtctacgccatcgacgacgagcgcggcgtggtctccaccaccgactttttcatgccgattgtcgatgaccccttcgatttcgggcggattgccgccaccaatgccatcagtgatatctacgccatgggcggcgatccgctgatggccatcgccattctgggctggccggtgaacgtgctggcgccggagattgcccgcgaagtgatccgtggcggccgttcagtgtgcgacgaagctggcattcctctggcgggtggccactccattgatgcacctgagccgatcttcggcctagccgtgaccggcatcgtgcaaaaacgccatatgaagcgcaacgacacggccaccgccggttgccggttgtatctcaccaagcccatcggcatcggcatcctcaccaccgccgaaaagaagggcaaattgcgcgaggcggatatcggcctggcccgcgactggatgtgcactctgaacaagcccggcagccgtttcggcaagttggcgggggtaacagcgatgaccgatgtcaccggtttcggcttgttgggccacctggtggaaatggctgacggcagcggcgtgaccgcacgtatcgaatacgccaaggtcccacgcctggccgggatcgaggactacctggatcagggctgtatgcccggcggcactttgcgcaacttcgatagttattcgagcaaggtgggacgcttgcaggaactgcacaaacgcgtgctgtgcgacccgcagaccagcggcggcctgttgatcgccgtcacgcctgagggcgatgccgaattccacagcgtggcgactgaactgggcctggtcctggaacctatcggcgaactggtcgagcgacagacccacgcggttgaggtgatttgatggcaaccgatatcaccgactaccgcgacattttcctcaacgaccggccgatgatggatacccgcgcgccggtcgaattcagcaagggcgcgttcccgggggtgatcaacctgccgctgatgaccgacgacgaacgccagcgcgtcggcacctgctacaagcagcagggccagcaggccgccatcgtgctcgggcatgagctggtttccggcgcaatcaaggccgagcgcatcgagcagtgggcgcggttcgcccaggccaaccccgagggctacctctactgtttccgtggcgggctgcgttcgcagatcgtgcagcaatggctcaagaccgaagccggcatcgagtatccccgtgtcggtggcggctacaaggccatgcgtacgtttttgctggagaccgtcgagcacgccgccacgcagtgtgacttcgtgctgctgggcggcatgaccggtactggcaagaccgaagtcctcggccagttgcgcaatgccctggacctggaaggccacgccaaccatcgtggctccagcttcggcaagcgcgccacggcgcagccgtccaacatcgacttcgaaaaccgcctggccgtggacctgctgaaaaagcgtgccgcgggtatcgagcagttcgtggtcgaggatgaaagccgcatgatcggcagttgcgcgctgccgctggcgttgcacaagggcatgcagacgttcccgatggtgtggctgcaggacagcgtagaggggcgggtcgagcgcatcctgcgcgactatgtggtggacctgtgcgccgaatttgtcgaggtgttcggcgatgccggccaggcgctgttcgccgagcgcctgacccagagcctgggcaatatccataagcgcctgggcggcgaacgcttccagcgcttgcaggcgatcttgcaggcggccctggcggagcaggcccgcagcggtgatgtgcacctgcatcgcgcctggatcgaagggcttctgcgtgaatattatgacccgatgtacgccttccagcgtgaaagcaaaggcgcacggatcgagttcgcaggggagcagggcgccgtggtggaatatttgcgcgagcgcgcgctgatcagaggatagccgcgccgatcaacccacacaccacccccaccaacatcgttaagcctgccaccgtcaccagcacccgcgcatcgaagtccttgcgcagcatcagcagggacggcaagctcacgctcggcagggtcatcagcaaggccacggccgggccggtgcccatgcccagggtcatcatggtttgtacgatggggatttcggcagcggtgggaatcacgaacaacgtgccgacaatcgccagcggcaccagccatactaggctgttggccatggcgccgtcgacatgggggaatagccacacccgtgcggcacccaggatcaacacggccaggatgtacaccgggatcgtgctccagaacaactgccacagggtccgcagccaacggccgaggaacggctgggactcaaccgcgctgacctcggccactgcgcccagcgccgcttccggcacctggtccgggcgggcgatacgttgcgcgatcagcgacacgcccaccaccagcacaatgcccgccaccagccgcaatgcggtgaagccccaacccagcacaaagcccatgaacaccagggtcgccgggttcagcaccgggttggcgatccagaacgcgagtgccgcgcccaccgatacctgctgccgacgcatgccggccgcgaccggagccgcgcagcaactgcacatcatacccggcagggcgaacagcccgccgcgtacagtcgaacccagcccggcacggccgaacaggcgcagcagccagtcgcgggggatcagcacttgcaggagggagcccaggatcaccgccagcacggcagccttccagatcgccaggaagtacacctgggcatacgccagcgcagccgccagtggcgagctttgctggtcgttgagaatcgaggcgccaatgctgtggttatcggcggcgacgaaggccttgaagtaatagggcgaccacttcacgtagtagaggccgacgcaggcgaccagcaggaacagcgctggtttccaccagaacgaccagccccggttgggctgggtggaggcgaggttgggcatggtgatgatccgcagatgagtcaatagcggcgcatcatacgccctcagctctcggcgctcacctgggtaggttgcgggcaggtttcttcgccattgttcaggccctgcttgtagttgcggctcagcagcgaggccttgccgttgtgccaggtcagtgtcagcacatacagcgtgtcgtagtcgctgccggaccagtcgtcggtgatggtgtgtttttcgccggacgcttcgctcgccaccttgttgatcagctccggcaggtagccgtgggaccaggcggtgtagatgatggagttgtggtacttgtcttcgaccagctcgtcggcgagggcactggtgtcattcgcggaaaacttgatgttgaccggcaggccgagcttgatcgcgctggggctgatggtcatcagcgggcgaatatagctgtaggaattgtccagctcgccttcctccacattgcgtgtcgggttggcggcgaagacgaaattggccttgccgaacttttctggcaaaaccgtggccaggttcatcgcccggttgagaccctggcaattgagctggcccaggccaccggcgggtttttcaccgtggcgcaggaagaccagggtttgcacgccgtcaacctggtcggcgttgctgatccgtgactccaggctcagatcgatagcgccgccgaccaacaatagcggcaacaaaatgtaggaatagcgtttcagtcgttgtactaggcgcagaggcttgatcgtcattgtaggttcgagtcttcatgcgtcacgttaaggcagacacgcctggccacgatgacgcctggggcgcctgcggtgttccatgtcgaaataacgaggtgcctccattcaccgcttgagcgcagttaagagtgcccaagggcgtattggttcgccctaacgggataatagccagcagttgttgcgtattgatgacccatgcaggacgctcgccagatgactatcatgggggctttcagcacacacatagggcttcccgatgaacccacttgccgctttcccgatcaatagcaaatggcccgcccagcatcccgagcgcctgcaactgtactcgctgccaacccccaacggggtaaaagtgtcgatcatgctcgaagagctcggcctgccctatgaagcgcataaagtcagcttcgagacccaggaccagttgtctcccgagttcctgtcgctgaaccccaacaacaagatccccgcgatcattgaccctaatggccccagcggccagccgctggcgttgttcgagtccggcgcgatcctgatctacctggcggaaaaatccagccagttgctctccgaggacccggcgacacgttatgaaaccattcaatggctgatgttccagatgggcggcatcggcccgatgttcggccagctgggcttcttcaacaaattcgccggcaaggcctacgaagacaagcgcccgcgtgaccgttacgccgccgaatcccggcgcctgctcgacgtgctggaaaaacgcctgctgggccgtacctggatcatgggcgacgagtacagcatcgccgacatcgccacctttccgtgggtccgtaacctgatcggtttctacgaatccggtgacattgtcggcattgccgactttccaaacgtactgcgcgcgctggatggtttcgtcgcacggccggcggtgatccgtggccttaatattccgagttgaagcatgccgactttcgatttcaaacagctggacgtgttcagccgcgtgccgctcaaaggcaacccgctggcagtggtgttcgctgccgacagcctcagcgaccaacagatggcggatttcgccaactggaccaacctcagtgaaaccacgttcttgctgacgccgcgtgatcctcgggcggactaccgggtacggattttcaccaccttgacggagctgccttttgccgggcatccgacgttgggcagttgttatgcctggctgcaggcagggggtgttcccaagggtgaggagataatccaggagtgcgaaatcggcttggtgcgtatccgtcgccaaggcgatgaactggcatttatcgcgccgccgttattgcgcgccggtgccgtggacgcgccgttgctggagcgtgtgcgcctgggcttgggcctggagcccggggtcattgtgcgcagtcagtgggtggacaatggcgccggctggctcgcggtgatgctggcagaccgcgaccaggtcctggcgttgcagccggactatgcgcaactgttggggctggccgtgggtgtgatcggcccctgtgaagccgggcgcgacgatgtggacgcgcaatttgaagtgcgtgcctttatcgccggcgacggcgcccaggaagacccggccaccggcagcttgaacgccggccttgcgcaatggttgctcagcgagggcctggcccccgagcgctacgtggtcagccagggcacggctattggccgggcagggcggatcggcgttgagcgccagggcgatgaaatctggatcggtggtgctgtttcggtgtgcatcgacgggcgtgtacagctctagatcaataaattgttaccgcccacgcaatacactattggcccctcggcgtttgtgctgccggggcctgggggcataagctttcgccccaaagattttctgccttgcgataggaccaccatgaccagccagttcccccaagcccgtccacgccgcctgcgccgctccccggagctgcgtggcctgttccaggaaaccgaattcaccctcaacgacctggtgctgccgattttcgttgaagaagaaatcgacgacttcgtgccgatcaccagcatgccgggcgtgcagcgcatccctgagaagaaactggccggcgagatcgagcgttatgcccgtgccggcatcaagtcggtgatgaccttcggtgtgtcccaccacctggacgccagcggcagcgacacctggaaggagcgcggcctggtctcgcgcatgtcgtcgatcatcaaggatgccgtgccggaaatgatcgtgatgtccgacacctgcttctgcgaatacaccgaccatggccactgcggtgtgatgcacggcgcccatgtcgataacgacgcgacgctggttaacctcggcaagcaggccgtggccgctgcccgtgccggtgccgatgtcattgccccttcggcggcgatggacggccaggtccaggcgatccgccgcgccttggacgatgcgggcttcacccatatcccgatcatggcttactcgaccaaattcgcctcggccctctacggcccgttccgcgaagccggcggcagtgcgctcaagggcgaccgcaagagctaccagatgaacccgatgaaccgccgcgaagccgtacgcgaatcgctgctggacgaacaggaaggcgcagatgcgctgatggtcaagccggccggtgcctacctcgacatcatccgcgacatccgcgaagcctcccgcctgccggtagcggcgtaccaggtgagcggcgaatacgcgatgatcaagttcggcgcccaggccggggcgatcgatgaggaccgtgtggtgcgtgagaccttgggctcgatcaagcgcgcgggtgcggacttgatcttcacctacttcgcgatggacctggcgttggccgggatctagaaccacaacaggtaaaatgtgggagggggcttgcccccgattgcgttggatcagtctacacatacagtgactgatactccgtcatcgggggcaagccccctcccacgtcaaccatgcccggcccgtcgtcgcccaaggaagccccatgtatccacgccgcctgatcctgtgccttgccacgtcgctggtactggccggttgctccaccacgcgcaacccgcaacagccgcagcgcagcgaggccgaggtgaaggcgcaggtcgtgcgcctgctgccggtcaaggtggctgatcgcgagggctgggcccaggacatctacacggccttcaacacccagaacatctaccccagcacggaaaacatctgcgccgtgctggcggtgaccgagcaggagtcgacctatcaggtcgacccgccggtgcccaacatgggcaagatcgcccaggacgaaatcctgcggcgtgccggcaaagtccatgtgccggcgtttgtcgtgcgcagcgccctgcaactgcgctcacccagcggcaagacctacgccgaccgcctcaatgctgcgcgcacggagaaggacctgagtggcatcttcgatgacttcatcagcatggtgcccctgggcaacacgttgtttggtggtttcaacccggtgcataccgcaggcccgatgcaggtgagtatcgactttgcacagaaacaggcgcggagttatccctacacggtggatggcacaattcgtcgcgaagtcttcacccgtcgtggcggcatgtacttcggcatcgcgcacttgctgggttacccggtgagctacgaccggccgctgtatcgctttgccgatttcaatgccggttggtacgccagccgtaatgccgcgttccaggctgccgtcagccgcgtctcgggcaccgaactggccctggatggagatctgattcgctacggctcgctgctgcccggcaccaccgagttggcggtgcgttcattgggcgcgaagctggacatgcgcaaccccagcatccgtagccagctggagcagggcgagcaactggatttcgaggaaaccaccctgtacaaacgcgtgtttgccctggccgacaaggccgccggcaagccgatgccacgggccatcctgccgggcatcgtgctcaagagtcccaagatcacccgtaacctgaccacggcgtggtttgcccagcgggtggatgagcgctatcagcgctgcctgaagcgctgatcaggtgcggcgtttgacaaaacgccgccacagccacacccacaaccacagcaccgggaacgccaggatcacgaacggcagcacatagcttgatcgctccaacgcgtcggcggtgccgtcgaccaggttgtcgcccaggttgctgaacaccctgctgaaccgtgattgctgattcgcaccatcagaggagcggaaattcagcgtcacccggttagtgtccaggcgacgttgctggctggcagcaacctgggccagttcctgtagctcgttttctatgccggcctgttccttgctcaaggcgatcaggtcactgacggtgatgtccttgcgcttggccaactcatccagtcgttgttgttgagcctgcaggcggtcctggcggcggcgtacgtcggcgacggcatcggccaggtcctcggcggtggtgatgcgctggccgagtgtgccgccttcagccgccatggcgaccatcggttcgacaccggttggcgcgatgcgcaggatgatctggccgccactgccgtcttcggtgatgccgaggatattgcaggcgccaaagcgcgcggtttcgcaggcttcgcgggtggcctgcatgcgcggcgcgagcagtgcaccaggcagggccaggctcagctcatgctcgtaggccagttgcgcgcccgcgcggctttgttcgccgttgattacccgtgcgcgggactgatccttgggcgaacagccggcaacggccagcgctgccagcaggaacaggagatagggttttggcttgccgtccagatggcgcattgcgattccttggcaggtacgggggaatttgacggcgattaaagcgggtctgatggattaacgcaaagcatcggaggggatttgtgcggctgatggtgatggccgttgtctggcgccaggcgtacacctcaagcctgacaccaaggaagaattcgccatgatcgctcacgccgtgcccgaagggtttgtctcgttgccccgcagtagcccgctgcttgacctgcttggcccggcgtattgccggggagaagggctgcaactggaaatcggcctgcgtgccgacaaccgccacgccaatgggcgcggtaccgtgcatggtggggtgttggcaaccctggcggatatcggcatgggctacgcgatggcgttttccagtgagccgccgctgccgctgattacggcgagcatgaccgtggactacctgggggcggtgcaggtgggggagtggattgtggtgcgcctggagcatcacaaacgcgggcggcagatggcgtttgccacggtgagcctgcaggtgggggagaaggtgatggcgcgggcgaatgcggtgtttgcggtgccgcagacgcgagattgaagggtaaagaaaaggcctggttttcgtggaaccaggccttttctgcgttgctcttttttctagagggctgctgcgcagcccgacgcggggcaagcccgctcgccacagcaagctagctcaccacggcgagcctgcgcctaccgtcaggcgcgttcgagggcgagggctacgccttggccgccgccgatgcacagggtcgccaggcctttcttggcatcgcgcttgatcatttcgtgcagcagcgttaccagcacgcggcatcccgaggcgccgatcgggtggccgatggcgatggcgcccccgttgacgttgaccttgtcggcgtcccattccagctctttgcccaccgccagggattgcgcggcgaaggcttcgttggcttcgatcaggtccaggtcgcccaggctccaaccggctttgtccaggcaacggcgggtggccgacaccgggccgatgcccatgatcgccgggtcgacgccggcgttggcgtagctggcaatgcgcgccagtaccggcaggccgagggccttggccttgtcggcgctcatcagcaacaccgcagcggcgccgtcgttgaggctggaggcgttgccggcggtgacgctgccgtctttcttgaacgccggtttcagcttgcccagggattcggcagtggtgccggcgcgtggctgttcatccacggcgaaggccaccgggtcgcctttgcgctgggggatcaggatcggtgtgatctcatcgacaaaccgccccgcctcgatagcggcagcggctttctgctgggaggcagcggcgaacgcatcctgggcttcacggctgatgccgtacttgtccaccaggttctcggcagtgatgcccatgtggtaatcgttgaacgcgtcccacagcccatcggtgatcatgctgtcgatcatcttggcgtggcccatgcgcaaaccggtgcgcgcggcgggtagcacgtacggagccaggctcatgttttccatgccgccggcgatgattacctcggcgtcgccgcaacggatggcctgggcgcccaggtgcagggccttgaggcccgagccgcagactttgttcaaggtcaggctgggcaccgcgtggggcaggccggccaggatcgacgcctggcgcgccgggttctggcctgagcctgcggtgaggacctggccgaggatcacttcatccacttcggccgggtccaggccggtctgctccagcaggcgacggatcacggcggcgcccagttccggtgccggaatgttcgccagcgaaccctggaagctgcccacggcggtgcgggtggcagcaacaatcacgacgtcttgcatggaatctgtcctcactggaagtgcatttctggaacgtggtccgggacgatcagtttaccggcggtcttgctcactatctcttcaacgctgacgccaggtgcgcgttccttgaggacaaaagcgccattttcgatttccaggtacgccaggtccgtcaatacgcgcttgatgcagtgggcgccggtcagcggcaggctgcattggctgagcagcttggactcaccgtccttggacgcatgggtcatgatcacgatgatgttttccgcaccggccaccaggtccatggcgccgcccatgcctttgaccagcttgccggggatcatccacgaagcgatgttgccttgtacgtcgacttcaaaggcaccgagcacggtaaggtcgacgtggccgccacgaatcatcgcgaacgactcggcggacgagaagatcgacgcgccgatacgcgcggtgacggtctgtttgccggcgttgatcatgtcggcatcaatggtttcttcggtaggaaaaggacccatgcccagcaggccgttttccgattgcagcatcacttccatgccttcggggatgtagttggccaccagggtcggaatgccgatgccgaggttgacgtagaagccgtcctgcatttcgcgggcgacgcgttgagccatttgttcgcgggtaagagccattttatgtgtccttattgttcgggctggaggcggattacttgcgcacggtgcgctgttcgatgcgcttctcgaacgtgccgcagatgatccggtcgacgtagatgccaggggtgtggatctgcgccgggtccagctcgcccggttcgacgatttcttcgacttcgaccacggtgatcttgccggcggtggcggccaacgggttgaagttctgggcggtgtggcgatagatgacgttgccgaagtggtcggctttccagcctttgacgatggcgaagtcgccggtgatggattcttccatcaggtacgggcgaccgttgaattcgcgggtttccttgccttcggcaaccggggtgccaacgccggtggcggtgaagaaggccgggatgccggcgccgcctgcgcgcattttctcggccagggtgccttggggggtcagcaccacttcgatttcgccgctgagcagttgcttctcgaacagggcgttttcaccgacgtaggaggcgatcaccttgctgatctgtttttgctccagcagcacgcccaggccaaagccgtcgacgccgcagttgttggaaaccacggtaaggtcgcgggtgcctttgcgcttgatctcggcaatgaggttttccggaatgccgcacaggccaaaaccgccggagagtacggtcatgccgtcctccaggcccgccagtgcttcctcgtaggacgccacgcgtttatcgaaacctgccatatgcacctcttttattgtttgtgggccagccaatgaatcgagtgttgctccgtcggattgatttgttaagttgttttttaaggttgattgatttaaaaaacagcatagttgcctggccgtttggagtagcgtcatgacagttaaacagatgcgcgcgtttctcgctgtggcccagagcctgagtttcgccgccgcctgcgagcgcctgcacctttcacagtcggcgctgagcctgaccatcaagggcctggaagaaggcctgggtgggcggctgttcagccgtaacacacgcaatgtcgcgttgacgcccgaaggtgaatcgctgctacccctggcacgccggctcattgccgattgggacaatgccgaggacgaactgcgccagcgctttaccctgcaacgcgggcgggtcacggtggcggcgatgccgtcgttcgcgggcaacctgctgccgccgatcctgaagatattccgcgcgcgttaccctcaggtgaatgtcaccgtgcacgacctgatcaacgaacaggtgctggaaatggtccgcgaccgccaggtggagctgggcgtggcgttcgagccttcagacggttcgtcgctggcgttcacaccgttgtatctggatcgcttcattgccgtggtgcccggggattcgccgttgattgagcttgatgaaatcgactggaaaaccttgctggagcagccgttcatcactttgcagcggccgtccacggtgcgggtgatgttggaagagcaccttggtgctctacagatgaagctgccggtagcgctggaaagccatcaactggcgaccgtaggcaagatggtggcgatggggttgggtgtcagtgccgtccctgcattgtgtgcgcggcagatggaggaggcgggggctcattgcatcaccttgcgtgatccggtgatcgaacgaccgattggggtgctgaccaaacccggtcatgaactctcggcggcagcgcaggtgttgtttgatatcttttgcgacgaagcgaagaagggacgatttcccgcagtgtgatagagccgaaattaaaaagcccgctcgaatgaacaagcgggcttaagtagttaatgcggtgttatcagcagtatctatcaatcactttaacttgcgattggcccttgaggttctgccattcggtattaagtgtgtggaagacctgttcgataaagttgcgatcggcggccgccttcttgccgacataaccctggccacggcggtacatcttcaggcgcgccgccagttcacggttattgcggtcaaactcggcttcttcggtgtggggcgccaggcagtcaatttgcacttcgcccgatttgccaatccacaggatatggtcgtcgagtgtgtctttctgcgctgcgaacatctcagccaattcatcgatagttggttggttgttcagattcatgtgtaagccccttgaccagttggcgatctatcagttggttcgttaatacttcgtaagttgtctccggttgcgaaaaccgggcgtcagcgactgtctgccgaatacgggcagggtcttgaacctgatgcatgtagtcttgctgatgaactgctacgcaatgctttcataacgaagacaagccgcatttgagcgccttgtaccgaacccttcgggccggtcagcttcatcaatccgccttgtgggcagtgcacatccggaaaaaacagctcggcggtcagacgagcttgttcaaaacgcttgttgccaacgctcccgatccgggagacgtctcgataatgcaaggacaaaatggttacgtcaacggttatgtagtgattatttttgctcactacataaattgccgtggggacgggagaatgcgggaaagcgtgacttgggcgtcattttctggaagtacaggtcaggctgtctaacgcctgttgtggcaagcccactcaccacaacaagcccgctcgccacaaaggacctgcgcttgattgagttaccgtaaccgttcgaccaaacgcggcaaaagccgctcgcattcggcttcgatcttcacctgcaacaactcatccccccgagtcttgcccaagttgatggcaatgaccggcttgccctgttcgaccatggccttgcacaagcggaatgccgaataggccatcagcgacgaaccgactaccagcaagccttcggcatggtcgacggcggtcatggctctggctgctgtcgccggtgctacgttttcaccgaaaaacaccacatccggcttcaagcgctcgccatcgcaatgggggcagtgggggacctgaaagtgttcttcaaaggcaggatcaagcaacgtgtcgccatccggcgcctgcaccgcatggacctgcgcaaggtaggggttgtcgatttccatccggcgctggatcacatcgcgtgcactgcgcaaccggcaatccaggcacagcacccggtgcaggctgccgtgcagttcgatcacatcgtggctgccggcctgatcatgcagggtgtcgacgttttgcgtgattagcccgctgatacgcccgtgttgctgcagcgtcgccaacgccaggtgcgccttgttcggctgcgcaatgcgaactctcggccacccgagcatcgcccgcgcccagtaacggcgacgtgcctgcgcggtggcgaggaactcctggtacatcatcggcgccttgccccggcgcacgccttcactgtcgcggtagtcgggaatgcccgacgacgtgctgatccccgcaccggtcaacaccagaaagtgccgttcggccatggcccgatgcaaggtgtcgaggtgatcctcttggtgttccagggtgtcgagcatgggttcccctattcgccgcggatgtactgctccagctgtctgatcaggtcagcctggtcggcaatggcttccttgaccaggtcgccgatggacagcagccccaacagcttgccgtcttcgaccacgggcaagtgacgcaggtggctgtcggtcatgatgttcatgcactcatcgacctttttgtgggtgtcgacggtgataaccggggaactcatcacctcatgaaccttggtggtgaccgacgacaggcccttgagcatgattttgcgggcgtaatcacgttcgctgatgatcccgaccaccacgccatcctgaaccaccggcaaggccccgacgtttttctccgacatccggaccagtgcttcaaacacggtgtgatcgtgtttgatgacatggacttcctggtttttctggtccttggctttgagcacttctgcaacggttttcatggtggccactccggtattgttgttggttagtcagggtcccactacagaatcctagaccggccaccgcgctgcaaggtccaaagcggcgctaaacccgtcaaaaaacgtcattcaccggtttttttcagtgtttaccccgcatttgtcggttttttggcccgcttggggctggctgccgtcttgcgcggtgcgctcttgcgtttctttttccatggcgtggcacctcggcctgccgggctggcgggaccggtgatggtcatgcgcatgccattgcagcgggcgacctgcttgctcatccaggccgcctgtttggcgacgaagtcttccaggctcatttcgccgctttgcaccatgtccagggcctgctcccagatggcggtggtgcctgggtcggcgatggcccggggcacggcgtcgatcaggctgaatgccgccggagtggctgatagcgccttgccgttcttcaccaggtaaccacggtccagcagcccctggatgatgccggcgcgggtggcttcggtgccgatgccggtggtgtccttgagtttttgcttgagcagcgggtcttcgaccagcttggcgacgttcttcatcgccttgatcaggtcaccttcggtaaagggtttgggcggttgggtccataggtccttgaggttgaccttgtccacggcatagtcctggccttgcatcaatggcggcagggcttgcggagccggtgcttcacgtcccttggccggcgccagggcttcgggcagggcgcgtttccagcctggttcgatgaccactttgcccactgcacgcaacgcaaaacctgcgcaatcgaaatccgcctgggtgcgatcgtactcatgattgggcaggaactgcgccaggtagcgtgcacgaatcagggtatacaccgcccggtgcttgccggtgagttgtcccacgtccttgccggcgccggtggggatgatgccgtggtgggcgctgaccttggcgtcgttccacgcccgcgagcgtcgctggggatcaatatgcggcatcagttcgttcactgcagtatccgcgcgcgccaacgcagccaggatcttcaatgcgtcgctgtgctggctcatcggcaagtagccgcaatcactgcgcgggtaggtgatggctttgtgggtttcatacagcgactgggcgatatccagggtttcctgggcgccgaggccgagcttcctggaacagatttcctgcagggtgcccaggtcgaagggcaggggcgccacttcgcgcatgcgttcggtgcgcagcttcaccagccgggcgctggcggcgttggtcatggcgtcggccgcgtcccgcgccaactgcgggttgaggcagcgaccctggtcgtcacaggcgtcctcggccgcgcgccattgggcggtgaaagtcatgcgttcgtggtgcaggtcgacgtcgatggcccagtaagccaccggcacaaagtcggcgatgctgcggtcgcggtccaccaccaggcgcagtgtcggcgtttgcacccggcctacgggcagcacgccctggtagccggactggcgcccgagcaaggtaaacaggcggctcatgttcatgccgatcagccagtcagcacgggagcgacccagggccgagtgatacaggctgaaggtctccgcgcccggtttgagcgccccgagggccttgcggatcgaggcatcatccagcgccgacagccacagccgctggatcggcccacggtagcggcaatgctccaccagttcgcgcgcgatcatttcgccttcgcggtcggcgtcggtggcgatcaccagcgcctgggcttcccccagcaggcgcttgaccgccttgaactggctggcggtcttgggtttgacgcgcatcttccatttttcagggacgatgggcaggtcggccagtacccagcgcttgtacttttcgtcgtaggcatccggcggggcggtttccagcaggtggccgatgcaccaggtgaccgtgaccccattgcccagccagcacccgtcgccacggcggctggcgccgagcacggccgcgatgtccttggcctgggagggtttttcacagaggtacagccgcatggtcgtcacatcagatcgggttgatgctgtgcaggatgctcagtcagcgcgcattgatcaaccattatctgtatggatgtacagcaatttatgtaggcacctgaaggcacatgtgggagggggcttgccccctcccacagcggatcttctgtgctcaggagatcggattagttgttatcgatatccacgtgacgggtctctttaaggcacaccatccccacgatcaaactaaccccggtcaccaccaccgggtaccacaggccgtagaagatatcgccggtgtacaccaccaaggcaaacgatacggtcggcaggaacccgccaaaccagccattgccgatgtggtagggcagggacatcgaggtgtagcggatgcgcgtcggaaacagttccaccatcaacgccgccagcgggccgtagcacatcgcggcgatcaggatcagcgccacgatcagcaccaccaccatggtcttgttgacctgggccacatccgccgaagacgggtagccagccagggtcaccgcgccacgcagggctttttcgtcaaaaccgtcgatacgcacttcgcccacgctcacctgcaccgggctgccggcgggtgcggcggcgctgctgtagggcaggccttgcttgaccaggaaggtcttgaccttgtcgcacgggctgtcaaatttcgccttgcccaccgggtcgaactggaaggtgcaggtggccgggtcggccatcacggtgatcggcgcctggttgctcgccttgtccatcgctgggttggtgtagtgcgccaggctcttgaagatcgggaagtacagcacggtggccagcagcaggccgagcatcagcaccggcttgcgcccgaccttgtccgacagccagccgaagaagatgaagaatggtgcgccgatcaccacgctgatgatcaacagcatgttggccagggccgggtccattttcaggaattgcgtgaggaagaacagcacatagaactgcgctgcgtagaaggtcactgcttgcccgccgttgatgctgaacaaggcgatcagcaccaccttgaggttttcccatttgccgaaggactcgcggatcggcgatttgctggccttgccttcctctttcatcttcaggaacgcgggcgactcgtgcaggctcatgcggatccaggtggaaatgcccagcagcacgatggaaaacaggaacggaatgcgccagccccacacttcgaactggtcaccggtgaagtagcggcaggccagcaccaccagcagcgacagcagcaggccgatggtcgcggtggattgaatccaactggtgtggaagccgcgtttgccggccggtgcgtgctcggccacgtaggtcgccgcgccgccgtattcgccgcccagcgccaggccttgcagcatgcgcagcacgatcaggatgatcggtgccgcaatgccgatgctggcgtaggtcggcagcaagccgacacagaaggtcgccacgcccatcagaatgatggtcaccaaaaaggtgtacttgcgcccgatcatgtcgcccaaccggccaaataccagcgcaccgaaggggcgcaccacaaagccggcggcaaaggccatcaaggcgaagatgaacgccgtggtgtcgttgaccccggcgaagaactgcttgctgatcaccgccgccagggcgccgtagaggaaaaagtcataccactcgaacaccgtccccagggacgaggcgaagatgaccttctttgagtcgttgctggtgctcgcgtcgatcgacgagcccaggggttgagcatgttctgacatcgggtagccctcacagtgattatttattgttgttccactgtcggcgccaggttcggcgccgctattcagattgcatgaaccagttctttctccggggcgagactccttgtattcggcgaaaggatcagctgcgcggccttctccgcgatcatcagcgtaggtgaacaggtattgccggacgtaatgcgcggcatgatcgacgcatcggcgatgcgtaaaccgggcacgccgtgcacccgcagttgggcgtcgaccacagcgtctttatcgctgcccatgcggcaggtgccgaccgggtggaagatcgtcgttccgatgcgtgcggcggcttcgtgcaattgcgcttcggtttgcagcgcatcacccggcaggtattccaccggcttgaactggctcagggccggtgcggcgacgatgcggcgcgtcaagcggatggcatcggcggccacgcgcaggtcttccggatggctgaggtagttggggcggatcagcggtgcgtccgccgggttggccgagcggatgtcgatacggccccggctctgcggacgcaagtcgcagaccgaagcggtaaacgccgggaatgggtgcagaggttcgccaaatcgctcaagcgacaacggctgcacgtggtactccaggttggccgaggtctgttccgggccggagcgggcaaacgcacccagttggctgggcgccatcgacaacgggccgctgcggtcgtacaggtagcgcaggcccatgcccatcttgccccacagggtgccggcgatctgattgagggtacgggcgttttccagtttgtagatcagccgcagttgcaggtggtcctggaggttgccgccgacgccgggcagctcgtgcaatacattgatgcccaacggtttgagcacattcgaagggccaattcccgagcgttgcaggatgcccggcgaacccactgcgccggcgcacagtacaatctcctggcgcgctttccagctcacttgctggccctgctgacgcccgaccacttgggaggcacggccgttttccagcagtacgcggtccacctccacttcggtcagcacggtgaggttggggcgctggcgcaccggcttgagaaacgccttggccgcgttccagcgcaccccggctttctggttgacctgaaagtagccgcagccttcgttatcgccctggttgaaatctttgatgttggcgatgccgctctgcgccgccgcatcgcggaacgcatcgaggatcggccagtgcaggcgctgctgctcgacccgccattcaccgccgtcgctgtgaaactccgagccgccggcaaagtggttttcgctctgcttgaacagcggcaacacgtccttccacgcccaaccttcattccccgcagcggcccagccgtcgtaatcctgggcctggccacgcatgtagatcatgccgttgatggacgagcagccgcccagcaccttgccccgtggataactcagtgcacggccttgcaggccttcctgggcttcggtcttgaagcaccagtcggtgcgtgggttgccgatgcagaacaggtagccgacggggatgtggatccaggggtagttgtcgcggccaccggcttcgagcagcagcacgcgatgtgcggggttggcggacagtcgattggccagcaggcagcccgcggggccggcgcctacgacgatgtaatcgtattcagcagttgcaatgggcatctgaaggtctcgcttgtttttcttattggccccatcctagttgttagttttcgtcttaaaaatgttagtttttgcccagctgctgtgcgtttttaaacagtgcagcccagggataggcaatggaggcgtcatgttcgactggaatgacctgcggtactttctcgagttgcagcgcagcggtcgcttgctcaccgccgcgcaacgcctgaaaaccacccacgccactgtggcccggcatatcgaggcgatcgagaaaagtctcggcaccgcgctattcgtgcagcatgcccagggctacgaactgacccccgccggcgaggccctgctaaaacatgccgaggccatggaaaacgtcgcactgctggccgaagacgagctgactcatgctgccgcgcccctgggcaagatccgcctgggtgtggccgaaggcctgggcgtgatgttcctggccagccgcatgggcgggctgttcgagcgctaccccgggttggaagtggagctggtggcggtgccgcgctttgtcagcatcctcaaccgcgaagcggaaatcagcattcacctcgagcggccgagcgtcgatcaactggtcacgcgcaaacttaccgactaccggctggccctctatgccagtcgcgcctacctggcgcgcaacccgccgattgaaaagcgcgaagaccttgcagcacacgcctggatcgattatgtcgacgacctgctgttcagccaggaactcaaattcctcagcagcttctgccgcaaccccaaggtggtgttccacagcaccagcgtgatcgcccagcatcaggcggcgcgctccggtttggggattgcggtattaccgtgcttcatggccgccggcgacccggacctggtgccgttgctgccgggggaggggatccagcgcagctactggatcagctcgcgccgggaattgcacaagtcagtgcggctgcgggtgttgtgggattacgtggtggagttgtgcgcgcgtgagcaaggcttgttgctgggcgaagccaactgaagaaaccggatcgataccgtggagtcattgaaccccgtcaggcacgcaactcaaactcggcactgcccagcctttccccattcacccacacatgcaccacatgccgcccagggtaatgcttgcgggttgtcatgtcgcgaatgtgctgttcgcgccgaatgtgctgctgttccccggcacccaggctgaacgccttgagtttgaataccttgtttgcactgtggccggcgcttttcacatagtcgatggcgtagtccaccaccagcttctgtggggctgtggcggtggattccagggtgaaggacagattgatccgctctcccaggttgatcaccgccggcgtcacttgcagatggtggatcttcacgtcggccctggccccggcccccatgatcgtcagcgcacgcgtgttgccttgcttgatcaggctgcgcagcgcgtggcgggcgatccaggcggtgtgagggttatccagattccaaccttcgatcaggctgagcacccactccgggtggtccttggtgatgtcgttgaggtggttggccactgatttgcgcacgtacaggctgctgtcggccttgaggttgtcgaggatcgacgcacacagttcggggttggcctgtacttcggccaggcggaacgaccagggcaagcgcggccgcgaaccttcgctggccaggcggcgcacgtgttcgttggtatccagcgaccattcgtgcatcaccgccaacgtgcgcgggaagtcgtgcagtagaaaatggcggatcgcgaattcggcggagccaaacgtcgtgaagtacttgagcgcggccattgaacgcttgaaatcatcccgaccgtaactcgccacgaagtgcggcaggaacaggctgacaaacgcgctgttcaagcgcggggccaacgcataaagcaccttgagggtttgcgggtagtccagtgggatcaccgcatgcaggctctcgctgacccgtgccatgcgctgcatcaccgacagctcggccagcccggccttggcgtgcttgagaaagcccttggcgtcgaacgccgggtacaccgccgtcatctcgctggcgatgtgttgcaggcgttcgacgttgaagatttccttgagggccggggcgctttggtcggtcatcggtgattccgtaggtgatgtcagagaaaccagcgatattcccgcgcatggatctcttgctggaaggccaggtggtcctggcgtttgttttcgcagtacacgtcgacaaattcggcgcccagcttatcgcgcaatactgcttgatgctgcatggcacgcacggcgtcgagcatttccagggggaagtcgctgccgctgctgcggtcttcattcagcggggcgatgggttcgcgcctggcttcaagaccgtgttccaggccgaccaggatcgccgccagcaccaggtacgggttggcgtcggcactggccaggcgatgttcgatacgcaggttgcgcgggtcggattcggggatgcgcacgcacgcgtcgcggtcttcaaagccccagctggcgcgggtggcggcgttgaccgtaccgcccaggcggcggaaggcattgtggttgggtgagaagatcggcatgcagtgcggcagcaattccaggcagccggccacggcatgacgcagtggttgctgctggtgtgccgccagcaaattgttacccgcgccatcatagaggctgacatgcacgtgcatgccactgccggggaattgcaggtagggcttggccatgaagctggcgcggtagccgtgtttcaatgccacgccacgggtactgcggcagaacagggcggcccagtcggcagcgcgcatcccatcgtcgaggtggccgaagttgatttcgaactggccggggccgatctcggcggtgatcacggtgatatcgatgccctggtccttggcggtttgcgccatgtcatccagtacttcgctgaagcgcgacagccgttcgatatgcaggttgggctggtcgtcggcatcatcgctcagcgggtcgcgggcaaattgcggcaggccgttgtcgagtttcttgtcgaacaggtagaactccagttcaaacgccaccaccgggtgaatgcccttgtgttgcaggcgttccagcaccttggccagcacttcgcgcggttcgaactcgatgggcgcctcggtgccgtccgaggtgatcagcatctggcccagcggctgcgactcccagctcaccggcttgagcgtgcccggcaccaggcggcggttggcatccgggtcgccgtcgttgaagcagtagtcgccaattttgaacaacccgccctgaacccccagcaacaccgcgttctgcggcagcttcaacgggctgccggcggcgactttttccagcatctcgatggggtagcgcttgccgtagaagtgcccgggaatgtccagggcgatcaggtcgacataacgcacgtccgggtgattctggcgaaaggtccgtacttcggccagtaacgtggaggcatggcttttcacgggtgttgctcctagttgtaaacccacaacacgcgggcgggcaggtcggtcaggttggcgtagcggcagtgggcgaaactggccaggtggaagctgtcgccggggccgagggtgactgagccgtcttcaccctccacccataacgtcaactcgccctccagcacaaaaccggcttgttcggcgcggtcgctcatggtctgttcaccgctgttggcaccgggggccagcaggctgtcgagcatcgagaaggcgccgttcatgctcggcgaaacgaggatgtcggtgatgccgttggcgtaatacaccgtgcgccgctcgttggggcgggtgatccagtccacggccttgggtttgggctggctgtagaagtaggtggtgggcacgtcgagggcgtggctgatggcggtcaagtcggccacggtcgggcgcgacaggccgcgttcgacctgggacaggaagcccaccgagcgctcgattttctgcgcgagctgggcgagggtgagcttcttgtgcttgcgcaggtcatggatcagcgcggcgagggtggcgagttcttcttggggtgtcatgaaatttatgtcgaataatttcatgaaaaactacaggaattatttcatgcgggcaatcggcaccttcaccgtagcaccggcattggggtccagccctttcaaggttttcaggtagaactggcgacaagtaccctgtggcgagcgggcttgtcccgcgttgggctgcgcagcagccccataaagatcaccgcagcgcatcaggtaacctgcggcgacaggttttggggctgctacgcagcccaacgcggggcaagcgcgctcgccacagttgcagtgttcgccctttatggaagggtatcagccagatagggccggtttttcaggggcggaagataaagggtttcacgccccaggtgcctgtcagttctacgccgccgaccaacagcagcaggttcccctcgtcgcgcgcttgaatcagtgcatcgcgcagggcataccgttgtccttccaggttggccggtgtgggtgcttgagggttgtactgtttggcggacagcttcggggagtgggtcttgcgcaatgtcagccaataccaggtcggtcggtctgggcgccgaaagatcaactcggtgctgtaccgcgagtcgaagacttcgtagtggctgtctgtcagcagttcgcgcatcagcgttttgatgttgatttgggtaggccgctccaacaggtttgaaaccaggacgggacgtaccccagccgtatcgaaccgtatgaggttgaactcatttgaaacccccaatgaccactcgaatggccctggccctctcggcaaggtgggcagcagtgccaacggatcgttcgcgatcagagtgtgccgctgggtcagtgtgccgacagcgcccctggtccattcggtccagtcctgcagggtgttgagcacatgcgcatagccttttgcggtcagcccggatgggttcgctgtgttgaacaggcttgcgccaacctgggcgcgggcgcgtgggtcgaagtggggaaacatgcggttcatgtgcgtggcaatcgatgagggaagcggcggctgcgggtggatgagccaggtgtccaagtgagcgttgtattccacgagcctgggttgttcaaacggcgcgttcgcgaccacgtgctcgaattgcgcgaatgtcgagtgaggctggtccgccgacacgatggcggttctcgcgccttgtgtggcgaatacgctatcgcctggcaggatcgcgtagtaacgcccgttgatcttgatgtagtcctgtagcgcctggctcggcgttgcctggcttcggcgccacacgcccgggcgccccggcacaggggtcatcgtctgtggcgcaaaggcctgcccccaatccacaaaacgctcggcgtcgctgcgcacagggcgctgaggcggcagggctggcctgcttggcccgggggcggggccgatggcggtgacggtttgggtgcccggcaggtcggtaccatgcaacctggaccagaagcggttctcggtggtttgcaggtacgcaaagcttagatcgagttggcttggcgcctggctcaggcggaacaccagggacatctggtgttcaaggttattgaacgcggggaaattgaaggattcaaacacccttcgagcctgttgcaggtccaggtgcggtaaaagatccatcaacgccctttccggcacggtagggggtgagccaccgaacagcccgatgagtggcgagcggatctcccaggctccttgaaccgtgcggtagagcggctcgcccgggtacgcactgggtgcgcgccgtgggtccttgagtcgccagacctgacgatcgtgatccctgcggatcgaataccagcggccactctcctgcaggaaatgccgaggcgcctcgaaggccccgggcgtcgccgtatcctgtacgtagatttgctggtcttcccatcctgccagcggcttgacgcccgtgggcttgctgcgcaacgccagcttcgggttaagtttggggccggttgcgatacctctactcgccgaacgcgcgccgccgatggcgccgtcgatcaccgcgcccaccatttcacccagggcccgcacaatgtattgggcggcggcggtgcggtcgccgagttgggcggcttccacggcattgatgatggacaggatgcttctggacaggccgatcggcagcatgaccttgaccggcaggaacaacgtggcgaagtccagtgccgcggtgacgagggtggcggcgctttcgaggttggcttcctgggtgctggtcgattgcgcattggcatcgttgatcacggcagacgcttcggcctggtaagcctcttccaggaagtgatcggcgatacggctcaaggcgatgaccgtttcattcgccccacctttgagcaggttgtggatgcgcgggcgggcactgagttgcacgcgggcagtcaggtagtcacgccaggcgctgtggttgatgaagtcgcggtgcatggccgacgcgtcggcgtattcgtggaacagccgaccgttggcggtgccgggggtatacaccaccagggaggcgacgctgtgggacgcggttgaaaacaccagcaccccgcgcacgcgttcaccgcgcagtttcaggctgctgacgatgatgcggtgctcttcgacggtggggcgtttatcgtcatccgtggggccggcgagggcactcattacccagttgtacccgcggtcgagccggtccggcaggaagtcgccggcgattttggcctcgatggcgtccacccgcagttgcaaggccatgagttgggcgtagcgatcctggtcggcgtgcgcctcgctggagctgaccaggcgcgacttgaggaattgctcgtagctgtcaccgatattgaccttgcgtaccagctccttgacttgcgccaccgtcagcgcggtatagggcgcctggtctttatcggtcagccaggcgaagtttgtgaagttgagatccagccactcaacgttttccagcgccaatgcggtcagggtcagcgtgcgtgtggtgtagaccggcgtgcctgtcgccggcggttgcggcttgccgccgaccacatagctgccggtggggcgggcggcgtaggttttggtgtggatgaggagggtgtccgggtcggtcaccacgccgtagtcggcctccagctgcctgcgcaactgctcattgctgtaggacagtacggcggcggggtcgctgaattgggacagggagggcagcccctcgggcatggacagccgctgcagctcatcggcgtattcctgtactgcgcttgtccagcgttgttgatcgccggggctcgcttgcttgagaaactgctggagctggcgccgcagtttcttctggtggcgggcgaccaggacgccactggcatcataggcacggctcagatcggtgacccggtcgaggcttgccggcaattgtcgtggggccaggccgtggggctgacgctggtagtgcgcaatcatccaggtgaagtctgcctgtgcccgctcatgcaaggcgtgcaggctatcgctgaacaccgactccagtcgttcgaggtagcgaaactggtcgccttgggggtgttgctggtgaaacgccaggccgctggcacgatcgttgtggctcatcagggccaggatgtcgccgaattcgatggcgctgttgagtcggcgatgcaattcacggtcaaggccggccagtgaatcgaaggcttcgaagccgctggtcgggaggtacaacagcacattgccgacgttggcctggggggcgatgtcacgcacttggagtggtttctcctcaccttcgaagcgcacctgggcgtcgtccgggtccctggccgtcagcacgaatgccccgtacagcgggatatcccgcgacagtttgtctttgaccgccacgcccaaggcgcagggtcggtagccgttcaaggcgcgtcgggaggccgcatccgggtagcgcatgacacgcaggagcagcagctcgctcgacacatcgagcaggctgtcgatcttcagcagttcggcttcggctctcatcagatccaggcgcttctcggccagccactgtttgctggtgcgggtatcgttggtgtcgatgggcgtcccccagaactgttcgacctgggtgttgaagcgcgccaccagggtgcttgccagcgtatcgagaaaaccgtcgaaggcctgcggggtgagtgccagtgccgagccgtagtcccgaccgtcgcaggtcaggtgaaagcgggtagcgtgcttggcgtagtgggcggagtgctgcgtgaccaatcgttccactgcggcctccatgagtgtcggcagcaacggattcaacgcttgagccggctcggtaggggacgcgtctgccgggttgatcttgaggtaggtcctggtcaggtcgaggggcgtggtcagcgtgttgaacgcctggttgaacgcatcctgcacacagctgaaaaacgtgggttgcccctgcaacagctgcctgatttcgctgttcagggtctggatcctctggaccaggcggctttcgcggcggttgtcgcgcgcgttcaacgtggtgatcatcggggtcgatagagcgttgccgtatcgcatgtcatttacctgcaaaataaggtgaatggccatggtgctgcgggtgcgggctgcgtgtgcgctatcccgttaatacgttgaagggtggcgtgtgcggtgtttgtgattgcggctgaatgtttgcgtgccgcagcggtccgaacctgggtacgcatcattcattgaggaacacccatgacatcaaaatccctgttcgcctccctgctggtcgccgcgagcctgtccaccgccagctttatcgtgcacgccggtgatacgccccaggagacggtaaagccttccagcatcaacacccgtgacctgaaggaaggtgaccgcgccccggatatcctgatgcgcaaggagtcggccgtcagcgactggaaaaagcgcggtctcaaacagcctgaagaagacagccaatgggcacgggtgggcgaccgtttcgtgctgctcaagaccactaacggcaccattctcgagatcacccccgtcaagaaatgaccttgcatttaggccctgctcctgagttaaggtagccggctataaaggccgcgttaccttcaaggaaagagagcaggatgcttgccacaataagaaactatccccgcaccgttaacctgttgctgtcctcgacgttgctgctcacgctggccaaggccatcacctttccgtacctggtgatttacctcacccgccacttcgccctcgacattacccaggtcggcctggtgatcggcagttcgttgatcgttggctcgctgctcagcgtgtatggcgggtttctggttgatcgtatccacagctaccggctgttgctggcccttaccttgctgttcctgctgggctttgtcggcatggtgctcgcggggagtatctggaccttctacacctgcctgatcctgatcaacctggctcatgccgtgatcgatatcgcggccaaagccggctttgccagcctgttgcccgaggacgcgcgcagcgaagtgttttccatcaagtacaccctgaccaatatcggttatgccgtcggcccggcgtttggcgcggtggtggccaaggtggaaatcagcttgccatttgtgctgtcggcgctgttggggctggggtttttcctgctgtattggcgttggggtgatcgtacgctggcgaccgtcgacaccacgcaaaagccagtgccgttcctcgccgttggccgggtgctgttgaaggatcgtcgccttgtctgcttcaccctcggcggtgtactgagtgccgtggtattcggtcagttcaccgcgtggctgtcgcaatacctggtgaccaccaccacggccgactacacctacaccgtggtcagcgccgtgctggtcaccaacgcggtgttggtgatcgccttgcagtacgtgatcggccggcgcatttcgcaccgctacctgggccaatggttgatcgccggcctgggcatgttcatgttggggctcatcggtttcgcgctgtccaccagcgtgctgtggtgggtgctggcaatggcggtgttcaccgtgggggagatcattgtgttcccggccgaatacatgtttatcgaccggatcgccccggaccacttgcgcggcatgtattacggggcgcagaacctgtccaacctgggcgcggcgctgggcccggtgctgtgcgggctggtgctggccagcctgccggcccattacatgttctggatgctgggcgcgtttatcgttgggggcggggtgttctacttcattggggcgtcgttgaaggcaagtcatccagcgtgagctggcccatggtgttgctttgcaattcgtagcgcagctcatccaccatcttttccacttcttgcggggtctgcaggcggttggtgctgatcccggtgacgaccaggtcgacccggccggtttcggcgtcgtagaccttgagggtcagggacgcatcccggcacagggtgaactcgcaggtcagcggcgacagaccttcttcgatgcagtttcgcagttgggcgagggtaaacatgcaggttccttcaggcatcaggttcgataccgagaaggttattgattagccctcgctgcaataaggcgaattcgcactaggtgtactagtgcatttgcactgtcatggcttgtttttgacccgcaattccccggcaaacagcccgcgttcacgggcccagacgatcgccgcgctgcggctgtgcacccccagtttggaatacaccgtggccacatggttacgcacggtgttgggcgccagtttcaggcgcgaggcgatctccttgtcggccagcccctcgcagatcaggcccagcacatcgcgctcgcgggcggtgaggtcggtgaaggccacgttcgactggctggcgctgttgacgctcttggcgttggccagtttttcgatgagggtctggctgaaccacgaggcgtcctgcatcacttcctcgatggccgccaccagttccagctccgagcgtttgcgttcggtgatgttcatcatcaccagcaggtagcagggcacgtcctggatgatgaccgtgtcggcggagaccacgcagtcgatcacctcgttgcctttcttgcgtaccttgaggtcctggccgtcgaggttgccggctttttccaggcgggcgaacagctgcgcgccagcctgagggctgtcgataaagtcgatgtcctcgatcgacttgccgatcaactcttcactggtataaccggtgatgctcatgaaggcttcgttgacgtccaccacctggtggttgctggcgttgcacaccagggtcggcaccggggtcaggcggaaggatttggcgaaacgttcctcactctggcgcagggcgatttccgctttgcgccgtggctccaggtccatgaaggaaaacagcatgcagtcctcttcgttcatgtccaatggctggccggcgacgatcaccagcttgctgccgccttcgggcagccgcagttcggcctgcatctgcgggacggtcgcgccttcgcccaggcgctggatggccaggtccttgcgttcggcctgttccagcacatccagttcatacacggatttgccgatgatctggtcgcggttgtagccggtcatctccaggaaaccctggttgaccttgatataacgcaagtcgctcaggcgacagatcacagccggcgccgggttggcgttgaaggttttttcgaagcgctgttcggcgctggcccactcggtggcgtcgctgaggatcagtaccagcaattccgcttcaccgcgggagtcagtgatcaccaggctgcgcaagcggtgcacccaggtcttttcctcatcggcaatgggggtgacttccaccaccacatcgctgaactcatcgcccgcggcggccctggccagcgggtagttgtccgcctgcaccgggtggttgttgcgatagcgcaggacaaagcgctcggcatattgctgcccgttggcccccagccccatcacgtcatgcacgccgtgcatggtcagtgcggcctcattggcccacaggatggtttgatcgacctcggccaggatcacgccgtcggatagcccggagatgatctgctgcaattggcggcggttggtttccttggcaagcacatcctgggtcatgggttctcctgggggtcggcatatgggagtacgacacctggggctcaggatagtgcggatgcattactggggcactggcattgaaccggctgggatgagccaccactcggcatcccgcgcagggggcgcgtagaatgccggccttttacgcatatctcgcaaaggtgccccttgagcgcaggcaaagccgtcggactgttgttactcacctccctgttggcggcgtgcggcacctcgccgccacgcacgccgaatgacctgtgcggcatcttccgcgaaaaggacgactggtacgacgccgccaaagtcacgcaaaaacgctggggcgtgccgatccaggtgccgttcgccatcatgtatcaggagtccggcttccaccaggacgccctggccccgcgcaaatacctgctgtggatcatcccctggggccgcgtctccaccgccgccggctacgcccaggccaaggacgaagtgtggaacgactaccgcaagagcaccggccgcagcggcgccagtcgccaggacttcgacgatgccatcgactttgtcggctggtacatggacaagacctacaccgtcaacggcgtgtacaaatacgacgcctacggccagtacctgaactaccacgaaggctggggcggctatcgtcagcgcacctacgccgccaaggcctggctgccgccggtggccagcaaggtacaggcgcggtcgcagctgtatgcggcgcaatatgcgcggtgcaaggatgatttggggcgggggttttggagtcggttctggcggtggctataaggaccacagtggtagtgttgggtgtgtctccttctctcagcgtgggagtgccgggtgctgggtgtagccaagcatctgatcatagatatcagcgcgccgatccctttgcaggtcattgagattgttccagatcggtgcgctgcgcgcgctgctgaggtcgatatcggcaaacagaatctcctggcggttcgccgacgccaccttgccgatgggccaaccattggtcccggcaatcaatgagcacccgagataacgggcatcacgctcttcaccaattcgactggctgctgcgataaacacgttattgacgtgcgctgcggtcatcgtcaggtaagacgccatgcacttgccggcctcatcaaataacgggggaggggtccatacccagttgttcaggctacaaatgatatcggcgccttgctggctgagaatgcgcggtacctcgggaaaccagatgtcccagcagatcagcatgccgatacgtccaatgggagtatcaaagacagggaaacctgtgttcccaggggtgaaccatagtttttccaagttccagaggtgcgctttgcggtacttgccgataaagccgtccgggcctatcaggacgctggtgttgaacaattgcatgccgtctagttcgctaacgcccgcagccagatacacacgatgccgggaagcaaattcgatccatacctgcacgcttcttccgttcggaacaatttcggcatggtcaaaggcatcttggcgattggcgaagaagtaaccgcagtttgaaagttctggaagcacgatcagtgtggcgccgccgttggccgcttcagttgcgagcgcaaggctgtgctgcaggttagcggtgcggtgctgcgttcctacctggggatcaaactgcacgacagaaacgcggacagggctgatagctgggttcattgcaggggactcttatgggggactgctctacataagaggtgatagggcggcaaggtgtaaatcaggtgcttccgtttaggttgtcagttggcgcctgccaatctgaagcgcttagttacggcaagaagcaaggcttcttgccgtaactcattcagctcggctgcatacactccagcgaccgatccaccatcacactggccatgtccaccagatgcatgaccgacagcaccaacgtgcgtgaagtcccttccagttgatccccggccgtttgcgccgcaacggcggcacaacgcaacacgctactggcgtgggccagggcgtcttcgaagctgaggtctggggtggtggtgaagaattgcagttctgaagcgggtggcgcggggacaggtttgtccatgggttcaactcctaatctaagttggaatgtcaccaccatcgctaccaaacgactttaagggtggtgaccgtacgcagattggtagaccggtgattaggacccggtgcacccgaaggtgccctgcgcacggccaccataacgcagggccgaaaaaaagcgccttgcataagggggcgcttagcgcctaatcactcgtggtctaccaaaccccgagtcactgaattggcagtgaccgacgaagactagccacgtgatttgagcggcgcaagcggttgggattctctcggaaacgtcctgcgagttaaagggaaatgtcactgatttgaggtgtttcatctctccaatattccttgtggcgccataagatcaaggcacaaaaactgacattagttctctggcgcaaaggtttcgcacatcgtcatcatcacggcacgcaagcttgcttgaggggcggcgggcttttttcattggtgtgtcatgtgtgtacaaaaaacgcattgccatttagcggtgtgtaatatacacacctaagggtgggcgatgagaagtcgagaggtgattgacctgttggttgcagatggttgggttgaggtggcggtgaaggggagtcatcaccagttcaaacaccctgtgaagcgggggagagtaaccgtccctcatcccaaggcggagattgccaagggcactctacacagtattttcaagtcagcagggctcaagcaatgactctgctggagcgttggacgagcgccgaagggctcgtccagaggaggatcaatgaaattcccagtggtagtgcataaagacgctgactcggattacagcgtgaccgttcctgatgtgccggggtgtttctcggcgggtggatctttctccgaagcattggataatgttcgtgaagcattggctttgcaccttgaaggcctggttgccgatcaagaacagcttcctcaggcgcaggaggttgatgctcatataggtaatccggatttcgcaggtggtgtctgggcgatcattgactttgatctaacgccctatctgggcaagtcagtgcggtttaatgcctctttgccggaacatctgttgcaacgcattgatgagcgtgtgcagaaggaccatcgctatgcatcgcggtcagggttcctggcgactgctgcattgcgcgagctttcagcgtaaaccaactcaagcaaacactatctatccaacggattccccatgagccccgaagaactccaaatcaccgacatccgccccggcaccggcaaagccgttgtcaagggcgcgctgatcaccacccaatacacaggcaccctggaggacggcacggtgttcgattcgtcctgggagcgcggcaagccgttccagtgtgtgatcggcaccggacgggtgatcaagggctgggacttgggcttgatgggcatgcaggtcggcggtgtgcggaccttgtacgtgccggcgcatctagcctatggcgagcggtcgatgggcgcgcatatcaagcccaacagtaacctgcgttttgagattgagttgctggaagtactgacgcgggatgattgagacctccaagacaaacgcttcctgaaccctccctgaagaatcctcttattcaccatacggaaactttcctacggtttactctcccatcatcggggcgtaagcttcgcgcgttttcatcaatagcggagaccctcagtgggtacttgttcgagtgacagtagtcggccggtttcggtaaccggcacaggcttggcaaggtaacgcgcatttttccgatgccgttgtctcgccactaaaagcgagaagcggcatcccggcagcggccagtcctggctcctgcccgaatccctctcatcgacgctgaccagcgcccggcttacctcgggatgctacggacgcgcctgccctttgcggcaggcgggccagggtggctgtgcctgtaaaaagggtgcggcgcacacggcggtacctgcacgacggttttttcctcgcgcaggagtaacaccatgaacctcactctgctcaaagagttcttcgccggcttcctgcggacccggcacatcgcccggcatttccgccgcctggcgatgctcgaaaccgtgaccgacgccagcgtcagccgcgaagtgccgccgaccctggcgcaaaccctggtggtctcggccaacagcagtgccgtgcaattgctcggcaccctgggcagccacgccgaggggttgaacactcaggaggccgacgccctgcgcgtgcaatacggcctcaacgaagtcgagcatgagcagccgctgccttggtgggtgcacctgtggcactgctacaaaaacccgttcaacctgctgctgaccctgctggcggtgatctcctggctgaccgaagacatgaaggccgccaccgtgattttctccatggtggtgctgtcgacgctgctgcgcttctggcaggaagccaagtccaacaaggctgccgatgcgctcaaggcgatggtgagcaacaccgccacggtgctgcgccgtgatgaagccaagcgcattgaactgccgatcaagcaattggtgccgggcgacctgattgtgctgtccgccggtgacatgatccccgccgattgccgtgtgctcagtgccaaggacctgttcgtcagccaggcggcgatgaccggcgaatcgatgccggtggaaaagtttgcccaccagcacgacgcccacacccgcaacccgctggacctggaaaacatcctgttcatgggcaccaacgtggtgtccggcgcggcgacggcagtgatcctgaccactggcaacagcacctatttcggcgcgctggcccagcgtgtgaccgccaccgaccgtgcaaccacttcgttccagcacggcgtcaacaaggtcagctggttgctcatccgcttcatgttcgtgatggcgccgctggtactgttcatcaacggcttcaccaagggtgactggaccgaagcgctgctgttcgcgctgtcgattgccgtgggcctgaccccggaaatgctgccgatgatcgtgacctccaccctggccaaaggcgcggtgttcctgtcgcgaaaaaaagtcatcgtcaagcgcctggacgcgatccagaacttcggcgccatggacgtgctgtgcaccgacaagaccggcaccctgacccaggacaagatcttcctggcacgccacgtggatgtgtggggcgaagagtccgatgacgtgctggaaatggcctacctcaacagctactaccagaccggcctgaaaaacctgctggatgtggcggtgctggagcacgtggaggtgcatcgcgagctgaaagtcggcactgcattccagaaaattgatgagatcccgttcgacttcaaccgtcgccgcatgtcggtggtggtcgccgaacagggccaaccgcacctgctgatctgcaagggcgccgtggaagaaattctctcggtgtgcaacaacgtgcgccatggcgagaccaacgaggcgctgaccgaggaactgctgacacgcatccggcaggtgaccgctgcgttcaacgaagaaggcctgcgcgtagtcgccgtggccgcacagccgatggcaccggggcgcgacacctacagcctggcggatgaaaagaacctcaccctgatcggctacgttgccttcctcgacccaccgaaggaaagcaccgcgcccgcgctcaaggcgctcaaggcccacggcgttgccgtgaaggtgctgacgggtgacaacgaattggtcaccgccaagatctgccgcgaagtgggcctggagcaacaaggcctgctgatgggcaacgacatcgaggacatgactgacgccgaactggccaaggccgtggaaaccaccaatgtgttcgccaagctgacgccaagccacaaggagcgcatcgtgcgcctgctcaaggccaacgggcatgtggtgggcttcatgggtgatggaatcaacgatgcgccggcactgcgtaccgccgatatcggtatttccgtggacagtgcggtggacatcgccaaggaagcggccgatatcattttgttggaaaagagcctgatgatcctggaggagggcgtgctggaaggccggcgcaccttcgccaacatgctcaagtacatcaagatgaccgccagttccaacttcggcaatgtgttttcggtgctggtggccagtgcgttcatcccgttcctgccgatgctgccgatgcacctgctggtgcagaacctgctgtatgacatttcgcagattgcgatcccgttcgataacgtcgatgacgagatgctgagcaaaccacaacgctggcaaccgggagatgtcggccgtttcatgctgtttttcgggccgatcagctcgatctttgacatcaccacgttcgcactcatgtggtatgtcttcgatgccaacacccccgaccaccagaccctgttccagtccggctggttcgtggtggggctgctgacccagacgctgatcgtgcacatgatccgcaccccgaagatcccgttcctgcaaagccgtgcggcgatgccgttgatggtgatgacgggcgtgatcatggcggtggggattttcctgccgatggggccactggcgcactacttcaaactgcaggcgctgccgtcgctgtatttcgtgttcctgccggtgatcctgctggcgtacatggcgctgactcaggcggtgaaggggtactacatccgtaagtttggctggcaatgaacagggaagatttcctatgcaagcaatcaacaacatcaacctcgaatccctggtcgacaccctggtcagcctcaccgcagccttcatcctgggtggcctgatcggttttgagcgtcagtaccgccagcgcacggcaggcctacgcactaacgtgctggtggcggtgggcgcggcgattttcgtcgacatggccagccgcctggggggcgcggaaggcgcggtgcgggtagtggcctatgtggtgtcgggcatcggctttctcggcgccggcgtgatcatgcgcgaagaaggcaatgtgcgcgggctcaacacggctgccaccctctgggcatcggcggcggtgggtgcttgcgcgggcgccgacctggtcctcgaagcgctgctgggcacgctgttcatactggcggccaacaccttgctgcggccgatcgtcaataacatcaaccgtcagccactggacgtggtgtcggcggaagttaccaacatcctgtatgtgattgcccggcgtactcagcagaaggccgtactggccttgctggaagccgagcttgcacgctgtaactatcccgccagcgacgttgacgtgcggccttttggcacggaagaagtggaaatcgaagccaccctggccgtgacctcggtagacggtgatgagctggacgccctggtggcgcgaatttcgatgtcgaccctggtggtgcaggcgttctggagccccagtaccaccgagtagtcccccgctgtcaggcattgccctgcgtaaagctggctatgctgtgacaaggaaaagtcctacaagcattagagactatcccttcatttgagcggacacgccgttgttaaggttgcgcgcttgcgtctgcccaggaagcagtccgcagctctacgtgtttagcgtgttctatcaaaaggaggggtctgtactgcctgaagtgtcatgcagagtaatcagtaccgtttgtcggaactgttacttttcacaggtagataggtcccgtgtgatatgtaagcgtactgatccctcggggagtcttatgagcagcaaagctttgattgtggacgatcacccttttatccgcgccaccgtgaagtacctgttgaagcaggagggcttcgataccatctttgaagcgggcaacggcgccgacgccatgcagattgctcgggaggagcacccggatctggttatcctcgatctggcaatgccaaaacttggcgggctggaggtgatcagccggataaaggcgctgggactgccctgcaagatcctggtactgacctcgtatctggcggtgtttttctccacgcgctgcatgcgcgctggggccatgggtttcgttgccaagaccggtgagctcgatgaactgcaaaaggcaatcagggcaatccgctctggttacagttgcttccccagcctgcccaccagttcagtgcgccgcgacgatttgcagacctccgaacaggagttggtggaggcgctgtccgaccgcgaattgacggtactgcaaaaactggcgctgggcctgagcaacaaggaaatcgccgaggatatgctgttgagccacaagaccatcagcacctataagacccgcctcaaagagaagttgcgcatgtcgtcggtggtgcacctgtccaagtttgcccagcgcaatcatctgatctgatctgaaatgaccacctcccggctggtgagattcacggccatcctgctgatggggctgttgccctgtgcagcgatggccctggatgagccacatgccctgcgactgctcggccattccaccctcgaacacccaacagtagcgctggatgacagcgactggcggtggttgcgcgatcgccgcagtttggtgatgggggtgtcggcacccgactacgcaccgttcgacctgagcaacgacaacgattttgaaggcatcacggctgactacacgtggctgatcagcctgatcttgaatgtacctatcgaggttcggcgctacgacacccgtgatgaagtgatcgaggcgctcaagctgggcgaggtggatctggtagggtcagccaatggttatgaggcggccgacaaggcgttggtactgtcgcgttcctacgccaatgatcaaccggtgctggtgacccgcacgggtgaaagccattccttgagcgtcgacctggccggcaagcgcgtggcgatgctctatcactatatgcaacccgacgctgtgcaggccttttaccccaaggcgcaactgttgttgtacggttcgacccatcaggccatcggtgccgtggccttcggccaggcggacgtctacttgggcgatgccatcagcgctcgctatctgatcaacaagaaccaccttaataacgtgcgcatggcagacttttccgccctcgaggtcaacccgttcgggttcgcgtttacggccgaaaaccagcgcctgttgacgatcgtcaatgccgcgctggctgctatcccggccagccagcagatggaaatcctgcgtcgttggagtgccggcggcagtgggttcctggaggctgaccgattgcgcttgagtgacagcgagcagcgttggctggagaagcatccccgggtgagagtggcagtactggataagttcgtgccgctgtcatttttcaatgaacaagggcagttcgtggggttgagtgacgaggtattgtcgcggatcagcttacgcacgggcttgaagttcgaagtggtgcagggcagttcgctgcctaggcaagtcgacgaggtcagcgccggccagatggacatgttggcggtgatcacgcccagtgtcgagcgttccgaaaaggtgcgctttacccgaccctacctgtccaatccctatgtgctggtggtgcgctccggcgacgagcgtctgctgaccctggaggacatgccaggcaaacgcctggcgttcattggtggcaacagcctcgctgcgcagatcgcccgggactatccagggatcgagtttgtcgacgtcgagaacccggagcaggccatggaatgggtggccaagggcagtgccgacgcgacagtcatttcgttgatcagcgcacgctacatgatcacgcgcaactatcgcgatcggctgcgtatcaccagcactgtgggtacggaaccggcgcggattgccttcggcgtcaaccgcagccagttggagttgtattcgatccttgagaaggcgttgttgagtattacgcctgaagaaatggacgaactgaccaaccattggcgcagtgaaatcattattgaagacagctactgggtcagtcatcgcaacgtgattatccaagggtttggcctggccgcgctgttgttgctggtcaccctgggctgggtgttttacctgcgcaacctgattcacaagcgtgcccaggccgagcgcgccctgagcgaccagatgcgctttatgagcgtgctgatcgacggcacgcctcacccgatttatgtgcgcgatcgccaggggcgtttgatggcgtgcaacaacgcgtacctcgacgtgttcggcttcaagttggaggacgtgatcggcaagactgttgtggagaccgatacgggtaacccgccccaggcccagtcgttccatgccgactatctggacttgatggagcgcggtgagccgcagattcacgaccgggtgctgaaggtgcccggtggcggtgtgctgacgatttaccagtggatgctgccgtaccgtgatagcaacggcaacgtggtaggcatgattgccggctgggtggacgtgagtgagcgccagcgcctgttgggccagttgcaggaggccaaggacgatgcggatgccgccaaccgtgccaagactacgttcctggcgacgatgagtcatgagatccgaacgccgatgaacgcggtgatcggcatgattgaactggcgcagaaaaacgccgaacaggggcatgttgatcgagatgcgctggaagtggcatcgatggcttcgcgcagtttgctggagctgatcggcgatatcctggacattgcgcgaatcgaaaccggccacctgtccctgaccctggagccggccaacctgcacgagctgttggcctctgtggcgcgggtgttcgaagggctggcgcgggataaagggctgtcgctgcacgtagagctcgacccgatcatcgatcgactggtactgatcgatccattgcgcttcaagcaagtggtgtcgaacctgttaggcaatgcgatcaaatttactcactccggccagatacgcctgggtgcccaagccgcatcggtgttggccggtgaacatttgaacctgcggctttgcgtggaagatacggggattggcatcagcgccgaagatcagcagcgtttgttcaacccgttcatccagggcagcaataacgagcagtcggcgcgcagtggttccggcctggggttggtgatcagccgtaacctgtgcgagatgatgggcggccaactgcacctgagcagcgtgctgggcaaggggacgcgggtggatgtgacgctggcactggcgttgaccacggcagcagcggtttcctcatctgtcccctgtgcgcctatcgcgcaggcattgaaacttctggtggtcgatgactatccggccaaccgcttgcttctggctcgacagttgaccttcctggggcatcagatcgttacggccgaagatggcgccgaaggctttgcgttgtggcaggccgggcattttgacggggtgatcaccgacagcaatatgcccgtgatggacggctacacgttggcgcgtgatattcgtgcgcaagaacgtcagcgcggcctggtgccctgccttctgctggggttcaccgccaacgcccagccgaaggaggttgagcgctgccggctggccggcatggacggttgcctgttcaagcccactgggcttgacgatctgcgtgcggccttggcgtcgcgcacggccagcgctgcaagggatgaagccaaagcgcaatttgatttgagctcgctggtgatgctgaccggcgatgacactgccgtgctcaacgagttgctggcacccttgctcacgagtcttgcagaggacctccgagtgctgtcgaccctgcgggacggggccgatttcggcaagctgcatgacctggcccatcgtgtcaaaggcggcgcgcgcatggtcaaggcccaggcgctgatcgcctgctgcgacgctttggaggatgtgtgcgaaaggcgcgatcgcgatgcagtggctgctgcggttgaggcgttggacgcggctatcactggcttgcatcacagcctaggtcagtactgcaagcagccttgaccgaggcaggtatccgttcggcgaatttgggagaactcctacatggaacgggaacaagcctgattttgtcgtcggcatatgtctggagaatgggcctcgctcactgacgagcactgcctgcccaggggttcgccatgccaaacaaagcactgaccatcctgattgccgatgagcaacacctgcaacgcctgtacatcgaaaaaatgctcaaccagttgggttatcaccggatcgtaccggtgcagaccttcgaagaggtccaactgctcaccgcgattccggcacagcctttcgatgtgctgatcatcaacgcggggctggcgatccacacctgcggtcctcaaccccaggtgcatcatgtgctggtctatgaccatctggatctgggcctgtctgccgacgcaacgccggcagtgctggtgcgcctgcccggcgtgccggacaacgtcaacctcgaacacttcatggacatcatcgacccgcctgcggccgccacgggcctgcgcgtactgccgtggctgcgggagttatcccgcacgcctgtggctggggtttagtcccactggggggcgatacccttggggctggtgaggcgatggccgcgttccagcccggccatctgcgccatgtccgcagggctcaaggtcagttgctgggccttgaggttgctttccaggttggcgcgtttggtcgatgacgggatgactgcgtaacccagttgcatcgcccaggccagtgtcacttgcgccggggtcgcctgatggcgctcggcgatttgctggatcaccgggtccttgagcacttcgccgtaggccagggtcatgtaggacgtgatctggataccgttggcggtggcaaaatccacgaccttgcggttttgcaggtaggggtgcaactcgatctggttggtggcgatattctccgcacctaccgccgcaatcgcttgtttcatcaggtcgacggtgaagttggaaatgccgatccggcgggtcaggcccaggcgcttggcctccagcaactggcccatgaattcggcgacaggcacctggtcctccggcgagggccagtggatcagggtgaggtccaggtaatcggttttcagtttgcgcaggctctcgcgcaggctcggaatcaactggccttcggcgaagttggcgatccagatcttgctggtgatgaacagctcatcgcgcggtatgccgctgtcggcaatggcctggccgacatcggcttcgttctcatagatttgcgcagtgtcgatgacgcggtagcccagctcgaggccagtgctgacggaatcgatcaccacctggccttgcagacggaaggtgccgaggccaaaggccggaacgttttgcgtagcgatagacatcagtgactcctgaagagggcttgaacaatggagtcgagtatccgcttgtcgttccttcggaaaaaccgtcgaatgcgaaaaggactctttaccgcagatcacgaatctactggggctggatgggtgtcgccgggttatcgcgactgatgtagagtcgtgctgccaactcaacccaaggaaatcgccgcatgacccaggaatcccgtttctcccggatggacccggaagtgcgcaaggccaatctggtccaggccacgctcacctgtctcaagcgtgatggtttccagggcgcgtcgattcgcaagatcagtgccgaggccggggtgtcggtggggctgatcagccatcactattcgggcaaggacgaactggtggccgaggcctaccgcaccatcaccgaccaggtcatgagcctgttgcgcgcgaccatggccaaggcgccgccgaaccctcgggagcgcctgtcggcgttgttccggggctcgttttctgccgaattgctcgacccgcacctgctggacgcgtggctggtgttctggggagcggtaaagaccgcaccggcgatcaacctggcccacgaacactcctatggcgagtaccgcgccatcatgcgctcggccctgaccgacatggcctgggaggagggctggaagcacttcgacgccgacctcgccgccatcggcctgagcgcattgctcgatgggttgtggctggagtcggggctcaaccccggcacgtttacgcccgaacagggcatccaaatctgcgaagcctgggtggatggcctgcaggctggcggtcgccagcgttatcagctcaaaccctgagcctgctccagccgcctgagcgcaaggttcaggcaggcggttttcccttctgaaaaaatttgcagtttgctgattgccttcttactgaacacttgtttagtatcgcctcatgtcgcacccctcaggccaaataaaacaattcgaggaagccatgaccgccgattcgcccgtgctcactcatgtagcagctggtgttgcctggatcaccctcaaccgtggcccgcagcgcaatgccctggacatccccaccctcaagcacctgcacgccttgctcgatgcgttcaacactgacgccgctgtacgcgtggtggtattgaccggtaatggacgaagcttctgcgccggtgccgacctggccgagtgggcggatgccgaagctcgcggcgccctcgaaacctacggctggaccgaaaccgcccatgcgctgatgacgcgcctgcacaccctcgataaacccacgattgccgcgatcaacggcaccgccgtcggcgcgggcatggacctgaccttatgctgcgacctgcgcatagcggcccaatcggcgcgcttcaaggccggttacaccagcatggcctactcgccggacgcgggcgccagttggcacttgccgcgcctgattggcagcgaacaggccaagcgcctgctgttcctcgacgagctgtggagtgccgagcgcgccttggcaactggcctggtcggcgaagtcgttgccgatgatcagctcaatgcccacaccaccgaactcgccgcacgcctggccaacggcccgacgttcgccttcgcccagaccaagacgctgatccgtgaaggcgccgggcgcagcctgcccgaacagttgcaggccgaacgggcggccggcctgttgtgcgggcgcagtgccgatggcgccgaggccttgcgcgcgtccatggaaaaacgcctgccgactttttgcggccaataaccccacttcctccgagcaggtagcgccatgcatttccaactcagccaagagcaagacatgttggtggacgcggtacgcagttttgttgccaaggaattgttgccccatgaggcggtggtggaccgtgccgatgaggtctcgcccgagctggctgcgcagatccgtgacaaggccatcgctgccggcttctatgcgttcaacatgccggaggaggtgggtggcggtggcctggactacctgtcccaggccctgatcgagcgggagttgtccaaggtctcgtgggcgctgcatgtgtttgtcgcgcggccgtccaagattcttatggcgtgcacgggagcacagattggcgactacctgctgccgtgtgtgcagggcaagaaaatcgactgtttcgcgctgaccgaacccggcgcgggttccgacgccaatgccatcaagacccgcgctgtgcgccggggtgatgacttcttgatcaacggcagcaagcacttcatcagccacgccgggcacgctgatttcgccatcgtgtttgcggtcaccgatacctacgaacacaacggccggcagcgcaacgccgtgacgtcgttcctggtggatcgtggcacgcccggcatgaccatccgtcgcggccccaagtgcgtgagcaaccggggttatcacacctatgaaatgttcttcgacgactgccgcgtccccgcttccaaggtactgggcgaagtgggcaagggctgggacgtggccaacgcctggctcaccgccggccgtgtgatggtggccgccaactgcgtcggccaggcccaacgtgcgttggatgtgtcgctgcaatgggcggcggaccgcaagcagttcggccagcccatcggcacctatcaaggcgtgagcttcaagctggcggacatggccacacagatccgcgcagcagaactgctgaccctgcacaccgcctggaagatggaccagggcagcatgaccgatggcgaggccgggatggccaagctgtttgccagtgaaacgctgggcaaggtcgccgacgaggcggtgcagattttcggcggcatgggcttgatggatgaggggccggttgagcgcatctggcgtaacgcgcggatcgagcggatctgggaaggcacctcggaaatccagcgccatatcatcgcccgtgaactgttgcggccactgttgcgttgatggcgcggagaacgcttatgtcccaggctaatcgcgacaacctcaagcgcctgttggcgccccggcatctggcttttgtcggcggccgcagcatggcccgtgtgctcaagcgttgcgccgagggtggttttaccgggccgatgtggctggtcaacccgcagcatgacagcctcgatggcatcccctgcgtacgtcgcgtggcggatttaccctgcgggccggacgcggtgttcatcgccaccaaccgcgaacttacactgacttgcgtcgccgaactcggggctatcggtaccggcggcgccatttgctacgcctcagggtttgccgagaccggggccgatggcgccgttctgcaacagcagttactagacgcagcgggtgagatggccttgcttggccccaactgctacggcctgctggactacctgcacaacgctgcgctgtggccggtggcccatggcggcaagacggtggagaagggcgtggcagtgctgacccagagcggcaacttcgcctacaacctgtcgatgagcgaccgttcactgccggtggcctacatggcatcagtgggtaaccaggcgcaattgggtattgccgaactgatggaggtgctgctcgatgaaccgcgcgtcaccgccatcggcctgcacctggaaggcttgaaaaatgtgccggggtttgcccgtgcggcccacaaggccctggaaaaaggcattccgatcatcgcgctgaaaaccggcgtgtcgcagatcggcgccgagctggccttgagtcacaccagttcgctgtccggctccgatgcgctgtacgacagcctgtttgcgcgcttgggcgtgatccgcgtgagcgggccggtgagttttgtcgaaaccctcaaagcggcggcatgcggcaaccttcctgcgggtaaccgcctgatcgcgttggcctgttccggtggcgatgcggggctgattgccgactatgccgaacgcaatcatctggccttgccccagcttgatgaaagccagcgccgtgaactggcacaggtactgcccagttacgccaacctggtcaacccgttggatttcaccacggccatctggggcaatcgcgaggccctcgacgccatgctcgacactaccctgcgcaccgatgccgatgccgccctgttggtgttggattacccggccgagtccacgggtgagcgcaaggagtgcgacctgctgctggagttgttctgcaacgcgctgggccggcatggcaagaccgggtttgtcacctcggcctttcccgaattgctgccggcccatgcccgcgagcgcctgcatgcccatggcatcgcggcgctgcaaggtgtggaagacgcgctggcggcgtgggggcggattgccggctaccagagcaatcgccgtgtgctgctggagcgcggcgaatcaatcctcgaaccgctatgcccgaaggctctgcaaggcagcggtgaggccctcgacgagtgggcttccaaacaagccttgcgcgcgttcggcctgaccacgccaatcgggatattgagtaccccggcccgggcgatcagcgatgcccaagtgcttggttatcccctggtgctcaaggcggtcagcgcgcagttgccgcataaaaccgaagccggtgcggtggtgctgaacctgaaaaatggcatggcgctgagcactgcacttgagcagatgcgcgagcacatcggcgcttatgcgccccatgtcgtgtttgatcaactgctgctggaggccatggctgcgccgccgttggcagagttgatcgtgggcatcaaacgcgaaaacgagtttggcctggcactggtcatcggtgccggcggcatcctggtggagttgctcaaggacagccgcagcctgctgttgcccaccaccgacagtgccatccgcaatgccttgctcagcctgcgcagcgccccgttgctgcaaggttttcgcggccgtgacggggcggatatgcaggcattggtcgcggccattcgggcagtggccgactacgcctgcgccaacgccgggcagttgctggagctggatgtgaacccattgttagtcagtgcccagggcgctatggcggtcgacgcattgatacgtctaggagatgagcatgcacgataacgcgatgaccggcggccaggccctggtgcggttgctggccaattatggggtggacaccgtgttcggcattcccggtgtgcatacactggagctgtatcgcggcctgcccggcagcggtatccgccatgtgctcacgcgccacgagcaaggcgccggtttcatggccgacgggtatgcgagggtcagcggcaagccgggggtgtgctttgtgatcactgggcccggtgtgaccaatgccgccaccgcgatcggccaggcgtatgccgactcgattccgctgctggtgatctccagcgtcaacagcaccgccagccttggcaagggctggggcagcctgcacgaaacccaggaccagcgggcgatcaccgcaccgatcaccgcattttcggctgtcgcactcagtgccgaggatctgcctgaactgatcgctcgcgcctacgcagtgttcgacagcgagcgaccccgcccggtgcacatctcggtgccgctggacgtgttggcggcgccgatcaagcgcgactggagcgatgaagtggtgcgccgcgccggtcgcggcgtgccgtctgcgcaagccttggatcatgcggtggccaagctcgcagcagcccagcggcccatgattatcgccgggggcggtgcactggcggcaggcgaggcgttgcagcgtttgagcacgcagttggctgcgccgtttttcaccagcgtggccggcaaaggcttgctgccgctcgatcatccgttgaatgccggtgccaccctgtgcgtcgagcccggctggcaactgatcagcgaggccgatgtggtgctggcggtgggcacggaaatggctgacaccgactattggcgcgagcgcctgcccctcaacgccgagctgctgcgggtggatatcgacccgcgtaaattcaatgatttctacccctgtgccgtggcgctgcgcggcgatgccaaccagacggtgctggcgttgctggagcgtttgccaaccgtgtcagctgacgcggaaatggcagccaagcgtgtggcggcattgctccaggccgttgagcggggacacggcccgttgcagtccacccaccaagcgattctcgagcgcatcgaagccgaactgcccgccaatgcgttcatcagcagcgacatgacccaactggcctacaccggcaactacacctaccgcagccgcgcaccgcgcagttggctgcaccccaccggctacggcaccttgggttacggcctgccggcgggcatcggtgccaagttcggcgcaccgcaacggccgggtctggtgctggttggcgacggtgggtttctctacaccgcccaggaactggccaccgccgtggaggaattggacagcccgctggtggtgctgttgtggaacaacgacgcacttggccagatccgcgatgacatgctcgacctcgacatcgaacccatcggcgtgctgccgcgcaacccggacttcgcgctgttcgcccaggcgttcggctgcacagtgaaccagccccacaacttggatgagttgcagacggacctgcgcaacgctttccaacgcaatggcgtgaccctgatcgagctgaaacaggcctgcgctgtttgaggaactcccatgaaggttttgattgttcacgcccatcccgaaccgcagtcgttcacggcggccctacgtgatcaagcggtcgccacgctgcaaggccaggggcacagcgtcaaggtgagcgatttgtacgccatgcaatggaacccggtggcgtcggcggcggatttttcgacgcgggaaaaccccgattacctggtgtatgccctggagcaacgcctgggggtgaagaaacagtcgatagcggcggatatccaggcagagttggacaagttgctgtgggccgatctgttggtgctcaactttccgattttctggttctcggcgccggccatactcaagggttggattgaccgcgtgctggtgtcgggcgtgtgttacggcggcaagcgcttttacgatcagggtgggctggccggtaagcgggcgctggtcaccgtgaccctgggcgggcgcgcgcatatgttcggcgagggcgcgattcatgggccgctggaggacatgttgcgaccgatcctgcgcggcacgctggcgtatgtgggctatgaggtactggcgccgtttgtggcgtggcatgtgccgtatatcagtgccgaggcacggcaggatttcctggtggagtatgagcggcggctgcaagggctggcggatgaacagcccttggtgtttccgaaacttgagcaatttgatgaggcgctgtacccgctgtagcagcgccctggtcggtcagcctcgtgcgcgcaaacgctcggcggcgctacgcaacaactgctcggtgccgtcccagcccaggcagccatcggtcaccgacacgccgtacttcatcgacgcgctcaacggctggcagccttcgaacaagtggctttcgagcatcatgccgatcagcgacgtgtcgccctgcaagcgctgctccagcacgtcgttgaataccgccggctgacgcagtgggtccttgccgctgttggcatggctgcaatcgaccatgatccgcggcgccaccttggacttggccaggtcgtgtttcacctgcgccacgctttgcgcatcgtagttcggcccacggtgaccgccacgcagtaccaggtgggtgtcggggttgcccggggtctggatgatcgccgggtggccctggctgtcgacgccgaagtgacggtgcgggtgggacgccgagcgcatcgcgtcgcaggcaatcgccacaccgccgtcggtgccgttcttgaaacctacgggcatgcccaggccgctggccatttcgcggtggatctgcgattcggtggtgcgcgcgccaatcgcgacccagctgagcaggtcatcgaagtagccggccgccatcggttgcagcagctcggtggcgaccggcaggcccaggcgcagcatttcgcgcatcagttcgcgggacaggttgaggccggcggccatgtcgtcgctaccgtccaggtgcgggtcgtaggccaggcctttccagccgatggtggtgcgcggtttttcgacgtaggcgcggatcaccagcagcatctggtcgctgacgtcgagtgcgagcttcctcaggttgcgggcgtattccatggccgactccgggtcgtggatcgagcacgggccgacgatcaccagcaaacgtgaatcctgaccattgaggatggcgcgcacggcgtggcgatgggcgtggacttgttcagtgaggaacgggctgagcggcagcttgagctttaaatcaagcgcgctgggcaagcgctgggtcagggcttcattggcgctggtcagggcagaaacgggcagggcggcggtggcagagttcatattcaaggcttcctgggcaagcggcgggctgttcccgcgcgcctggccctactggggtgttcgacaatgggccgtattggctgtgtgtgttggcttgccacccataggtgaccgatcggaggcggcaggctgtcccgagcggagctggctaaatcgccatgcggtggaagtgtcgtagcggtaataggtggcgtagttcatgtcgtgtgtcctttaagtgttcgtcaaaaatagtggggcctgaaaaacaaaacccccggtcggggagccgaccgggggtttggatttctctggtaggcgaccccttgagtagtgggcgccgatttcaggtatcaggcgcgccagtggctaaaccaatacccaaaataaaagctggccagtgcgctcgaacccttcacacgggtagccgataccgagcgcggggcgctggcagcagggcaaacctgaggggtggtgagttgcaacatggtgtgtctccaaatgatggggggagcttactagagggatgcaggaggattcaatcagtaatttctattgcgcggggggactgactgctatcgaccgagatatgcttgcaacaccttggatgattgcttggacgcgaccatgactgccctgacccttgctgctgctcaatctgtttccatcgcgggcgacgtgccggccaatatcgagcggcacttggcccttatgcacgcggcggccgaccatggcgtgcaagtgctggtgtttccggaactctcgttgaccggctatgaaccgtcgctggcggccgaattggcgattgttcccgaggacgcggtgctggcgccgctgcgcgaaatggcacgggaattgggcttgaccacagtggtcggcatgccgatccgcctggcaccaggggcaggtgtgctgatcgctgcgctggtgttgggggccgacggttctcttgcggtgcacaccaagcagcatctgcatcctggcgaagaactggcgtttgtcgcggggcagggtggtgcggcgctcgacactggcgatgaccgcattgcgctggcggtgtgcgcggatttctcccatggcagtcacccgcgccaggcggctgaggcgggcgccactgtctacgccgccagtgtgttgatcagcgaaggcggctatgcaacagacagcgcgttgctccggggctatgcggccgagcatggcctgttggtgttgatggccaaccatggcgggccatcgggtggctatgtgtgtgccggtcgcagcgccatttgggccaccgatggccgtttactggccgccgcgccgggcctgggtgaggcgttggtgatcgcccgccgcaagggtgctgcgtgggctggtcaagtggtagtgctgtaaatggggtttcacctgcgcgccgcgacggaccaggaattgccgttcgcccgaaccttgacctttgaggccatgagtcgctattacctgcaatacgacctggtgtggtccaacgatggctttgatgtcgcctgggcggaccgcgaaaactggctgatctgcaacgacgaggccgtgctgggttttatcagcctgagccgcgacagccgcgcactctacatccgtgagttgcatatgcttgcggcgtgtcgcaggcagggcgcgggcagttgggtattgcagcagatggcgctcaaggcccaggcgttggggttgctgcgtttgaccgtgttcaagaccaacccggcccgcaggctctatcagcgcatggggtttagcattgtcggtgaggaagactgcttctggcgcatggaacgtatttgcccatcaagctaaaccatgcgctcaatcctaataagcgcatactggttttcaggagacgacttcctgatcgttgttttggccatcagcctcagaaaggatgatcccttctttcatgcccaacaggaccgctaccttatgggcttctccacgccgtccctttttgcgccccgcgagtacttgataggtggttgccggatcaacgccatgttctcgggcgaacgcttgaactgactttccttgatgttccagccaagccttggcttgtgcggcagtgcggattccgggcatagttcaaaaccgttcaagtttgtttaacaaagagatgagtgtgtcacctcttggggtgtgccaaataggatcatacatccaaatgagtggaatcggttcgcgtttgaggcaagaaagggagcgacttgggctgtcgcaaaaagtgtttggtgaaattggaggcgttgaagccaacgcacaaggtaaatacgaaagtggagggcgggcgcctaaagcagactacttgtcccgtgtcgccgaaaaaggtgtggacgtgttgtacgtattgaccggtattgccacccccattcaactggataacctgacccagattgaagaaaaggtactgggagactaccgcgcgatgttcaaggaagaccaggctgcgatccgccgcttgacgtctaccctggccgaacattcagcttcgctgaatggaaaacccaagccgcagccccaggattcctgacctgccgcccaacaaatagagccgttcaccctagggtggacggcgtctgtgtgttcaaactctatatatatgacgcttgcagctaggtctgcgccttggttttttgctaaggtgttcagcaacctataagaccatatcgcgaggtgtctgcttgattagggtgctagtagtcgatgaccatgatctcgttcgtacaggcattacacgaatgctggctgacatcgatggcctgcaagtagtcggtcaggccgagtccggggaagagtccctgatcaaggcccgggagttgaaacccgatgtggtgttgatggacgtcaagatgcccggtatcggcggtcttggcgccacgaccaagttgttgcgcagccacccggacatcaaggtcgtggtggtgaccgtgtgtgaagaagacccgtttccgacgcgcctgttgcaagccggtgcggccggttacctgaccaagggcgcaggcctcgccgagatggtgcaagccattcgcctggtgtttgccgggcagcgttacatcagcccgcagatcgcccagcaactggccattaaatccttccagcccaccagcgactcgccgttcgatgcgctgtcggagcgggagatccagatcgccttgatgatcgtcggctgccagaaggtgcagacgatctccgacaagctgtgcctgtcgcccaagaccgtcaacacctaccgttatcgcattttcgagaagctcgccatcagcagtgatgttgaattgaccctgctcgcggtgcgccacggcatggtggacgccagcgcctgacatgaccacaccgtttgatcccagtgccttcctctcgacctgcagtggccgccccggcgtgtaccgcatgttcgacagcgaggcgcgcctgctgtatgtcggcaaagccaagaacctgaagaaccgcctggcgagctactttcgcaagagcggtctcgcgccgaaaaccgccgcgctggtggcgcgcatcgcccaggtcgaaaccaccatcaccgccaatgaaaccgaagcactgctgcttgagcagacgctgatcaaggaatggcggccgccttacaacatcctgctgcgcgatgataagtcctacccctacgtgtttttatccgacggcaacttcccacgcctgagcattcaccgcggtgcgaagaagcagaagggcaagtatttcgggccctatcccagcgccggcgcgatccgcgaaagcctgagcctgctgcaaaagaccttttttgtgcgccagtgcgaagacagcttctacaagaaccgcacccggccgtgcctgcaataccagatcaagcgctgcaaggcgccctgcgtgggcctggtggagccggccgagtatgccgaggatgtgcgccactcggtgatgttcctcgaagggcgcagcaatgccctcaccgacgaactttccggcgccatggagcaggccgccagtaccctggactttgaaaaggccgccgaactgcgcgaccagatttccctgctgcgccgcgtgcaggaccagcagagcatggaaggcggtaccggtgacgtcgatgtgatcgccgccttcgtcaacccgggcggcgcctgtgtgcacctgatcagcgtgcgcggcggacgggtactgggcagcaagaacttcttcccgcagaccggtatcgacgaggacgtggccgaggtcatggcggccttcctgggccagtattacgtgagcagtcccgaacgcgacctgccgtcggagctgatcgtcaacgtggtgcacgaagacttccccacgctgatcgaggcgatccacgaactgcgcggccgcgagctggacatcagccaccgcgtacgcggcacgcgagctcgttggcagcaactggccgtgaccaatgccgaacaggccctgggcgcgcgcctggccaatcgacagcacgtcgccgcacgcttcgacgccctggccgaagtcctcaacctggacgaaccgccgcagcgtctggagtgctatgacatcagccactccagcggcgaggctacggtggcatcctgcgtggtctttgggccggaagggccgatcaaagccgattaccgtcgctacaacatcgaaggcgtcaccgccggcgatgactatgcggccatgcaccaggccctgacccgacgtttcagcaagttgaaggacggcgagggcaagctgccggatatcctcctggtggacggtggcaagggccagctgtccatggcccgcgatgtactcaacgaactggcggtgcccgacctgatcctgctcggcgtggccaagggcgccacgcgcaaggcgggtttcgagacgttgtacttgaatgatgccgcccatgagttcaccttgaagggcgactcaccggcgctgcacctgatccagcagatccgcgacgaagcccaccgtttcgccattaccggccaccgcgctcgtcgtggcaaaacccgacgaacctcaaccctggaaggggtggcgggcgtcgggccgacacggcgacgcgacttgcttaaacattttggtggcttgcaggagctatcccgtgccagcattgacgaaatagccaaagctcccggtatcagtaaaaagctcgctgagttgatttatgcgaatctgcacagcgaatagaatgcctttccacctcgtagccagttgtgccgatgaatatccctaatctgatcaccgttctacgcgtcctgcttattcctattttcatcctgttgttttatttgccgtacgaatggagttatgcggcctccagttcggtattcgccttcgcggccgccaccgactggctcgacggctacctggcccgtcgcctggaacagagcacgccgttcggcgcgttcctcgacccggtggccgacaaactcatggtcgccgtcgccctggtcctgctggtgcaggaacacggcaacctgtggctgaccctgccggccgccgtgatcatcggccgcgaaatcgtggtgtccgccctgcgcgaatggatggccgaaatcggcgcccgcgcccatgtcgccgtctccaacatgggcaaatggaaaaccgccgcgcagatgctcgcgctggtgatcctgctggccaacccgtcggacttctccttctgggtgttgaccggctacgccttgctgcttatcgccgccggactgaccttgtggtcgatgctccagtatctgcgcgctgcctggccgcatctgcgcaccaccgttgaaaagaaataaaacattttcgaatcaaggggttgaccggttctgataattctatagaatgcgcatcaccaagacgcgggaatagctcagttggtagagcacgaccttgccaaggtcggggtcgcgagttcgagtctcgtttcccgctccaaacacaaaaaaaagccactctaacgagtggcttttttttgcctgctgttccgtccagaatcgtgtccgccattcgaccagtctcgattggcgattgttcgcgcagcccaacggtcagcgcctgaaagcctgccttttggccatcgagacaatcaatagcgccggcagcagcagcgccaatgcaacccagggaatagcgctcgcccctcggcttcccaggagaacaccgccgatcacaccgctgcctgcaaatgccaggttaaacacggtgaccagcattgattgcgcaatgtcagcgccgtctccggcaacttcagccaaggcggtttgcaataaggttggcgcgccaccgaagctcatcccccacaagacgatactgatgtagatcgcactggcgggcaggtcacccagcccaagggcaagcgacaccaggctgaatgccgtcaggctgagcagcaccaggctgcgaagcctgccatcaatcagcgtgccgatcacccataggccgaacaaggccgcaataccgaatgcaagtaggccccgatcaacctgatcggccaagccaaccgaagccaggaacgctgcaatataggtatagagcgtgtaatgggccaggatccagagcatgaccaccgccagcaccggccgcacccccggggtttgcaagactctgcgcagcggcaggtgccgataggcgcgttgtccgggaaaatcaggcactttcagatagatccaggccatcagcaaaaggctgagtcctgagagcgtcccgaacacgcatcgccatcccagcagtttgccgagccaggcacccagcggtacccccagggccagtgctaaagggatgccgagcatggccagcgccatggcgcgaccttgcaattgtggggcgaccaagcgtctggcgtagccggccagcaggctccaggccagaccggtggcaatgcccaccatgaagcgcgccgccagcgtcaatgcaaaccagggcgacagggcggtgaccgcattgcaggcgcaaaacaccgcgaccgccagtaatagcaacaagcgccgaggccaaccctgcaacgcgagcgtcaaaggaatagccgccaaccctgagcccagtgcgcatagcgtcaccatctggccggcccacgcttgcgacacacccaatgcctcggcgatctgtggcaaaagtcctgcgggtaccgtttcgttggcggtggcgataaagctacccattgtcagcgccaacagggccgccagtggcagacgcccggtggtgagatgttcgagagtgttcgatgtcgtgaaagagccattttcaacatgtgatttgccagtcatgacctgtgctcagtgggaagggagggacaagtgtgatgaattgccacagatttgataattggcctaccatttgatgatctatcaaatttgaattgaatatgaccactgaccgattgggtgatatgcgtttgtttgtcgaggcggcggcactcggcagcctgtctgccgcaggacgcaaactggcactgtcgccagctgcggccagcgcgcgcctcatcaagcttgaggcggcgctgcgcaccaaattgtttgatcgcacaacccgtcagttgcgcctcacggaagaaggtcggttttacttgcagcagtgctgggtcgcattgcgggctatcgatgaggcggaagcggggcttcaagccagtcaaactgaagtgcgtggcaaggtgcggatatccgcgtctgccgactttggccgcaatcttttgaatgactggcttgaggcattcagtgtgttgcaccctgaactgtgcgtcgcgctgacgttgtcggattcggtgtcgaatctggtgcaggacgatattgatctggcaatccggtttgggcagccacatgaaagctcgatgatcgccaggcagttagcgcccaactggcgagtactgtgcgcttcgcctgactacctggcgcgatacggtgtaccccagacccctgctgacctggttaaccacaagttcatcgtgctggtgactggcgcagggccattgaacacctttcactttgtggtggacggtcaggcatggaaccacaccgtgcccatgagccaggcatgggagaccaacgatggcgcactcgcgcgcgcatgggcgttggccgggcatggcattgcacgtaagaccatctgggatgcggcagccgatatccgtgctggacgattgaaagtcctgttgcctgacttttgtgtcccggaggccggcgtctacgcggtattacatggcaaccgttaccgggttccccgcgtgcgggtcttgctggatttccttgtcgagcagttcgatcgcgcaaccgatgagctgctgtcaggtcttgaagtgcctgatgccaggcggtcgtaagccacgtcataccagataggggcgtggtcgctcagccttgggttttcctggcgcgggatttcttctgcgcaggttgagcgtcgccctcatcgagcgcgtcgccccccaggctgcgggtcagctgtacggcagcgctctgaaacagtgggtgcaacgtctgtgcctgttcggcggtcagtcggctcgcggggccggagagtaccagcgcgccaatcaggttttcccccgggccgaaaatcggcagtgccatcgaggaagcgtgcgggtccgtggcgcccacggagtaaatcggtttcatcattttcgccgccagggagtacggcgttctcaacgcttcggcgccggcggcgccgtccatggggcgcgtatcaccgggttgcaggtgcaggcgcaagtggtgcggtgagttcacgcgatagaggcacattcggtaagcgccatgcctgacataaaaggatgccgtttctccggtttcctgggtcagcgtgtgaagcaatggggtgatatgccgttccaggtcgagcccgtcctggtagacggtattcaagcgcatgatctccgtggccagttgatagcggccgtcggccaggcggctgatcaggccgtaattttccagggaaaccatcaagcgcatgatggtgcttttgatcagcccggttcggtcggcgagttcagccagctccagggcggtgtcgcccatcttgaacgcggtgagcacggtcagcacccgatcggccgaagcaaccccggtgactgccgggcgcgggcgaatttttaccatagggtggctccttgtgagggtggacgtgggctgtgcgtgagcagggtgcaaaatactgccattgtcgcgcgggggcaatgcgcgcgaaggattggccgcgcgcgctaaataaaacgctgctggcggggcggggcccggcagcagcgagagtgcagcctataggggaggtcagcccgcgctggcttccttgttgaactccacgggatcactcgatttgttcatgtgcttgcgtccgatcaacagcaccatgagtgcacccagcgcgcacagtgccgcgagcggcagcagggccaacgcatggctgcccgtggcatgctggatcgtgccgtagacgttgaccataaggccgccgccgatcaggttggccatcgcacccactgccgccaggcctgccgctgcggtggaggacgacagccaggtcgacaccagggcccagaacggtcccttcatcgagtaagcaccgatcagcaccatggacatcatcagcacggttgccaccagtgaagaggtcatcagcgccagcaacaggccggccgtgatcaacaacagggtggtcgcggtgtgccagcggcgttcaccggtcttgtcggagctgcggccccacaggatcatcaggatcgacgccaggccgtacggaatggcattgaccaggccgatttccaggttattcaagccaaaggtcttgagcaattgcggtgcccagacactcatggtgctgcctgccgccgaggcgccggaatagatcagcgccaatacccagatgtgtttgtggcgcagcagcttccacaacgagatatgcccgatggcggtcttgcggccgcgttcttcggccagtcggttggtcagccagccacgttgctcgtcactcagccatttggcttgctcggggcgatcggtcaatacgaacaggcaggcgatacccagcaacactgcgggaatgccttcgatgatgaacaaccagtgccagccgcgcatgccaaaccagccgtccaggctcagcagaaggccggacagcggcgagccaatgaagttggcgccgggaatggcaaccatgaagatcgcaaccatgcgtccacggtaggcggccggcaaccagtaggtgaggtaaagcagtacgccaggaaaaaagccggcctccgcggcgcccagcaggaagcgcatcacatagagcgagttggcgccctgcacgaatgcagtgcctgccgaaatcagcccccaggtaatcatgatgcgagcaatccagacccttgcaccgaagcgctgcaaggccaggttgctcggcacttcgaccaggaagtaagagacaaagaacaggctgctggcaaagccgaagatcgccggtgtcaggcccaggtcctggttcatctgcaaggaagccatgccgatattgccgcggtcgatgatcgccagcaggtagcagaggatcaggaacggcagcagccgccacgccaccttgcgcatggttgagcgctcaacggcgctgatttcggtagagctggtagacatgactctctcccattttgttttttttggagaagcgttatgacccgcactgctacttgaggcgtgcgggttgcatgaattcaatcactgcgcatagagatgacgattgaccaccgcgcgcgggtcgggcgcgatgccgccccagaaatcgatgatctgttgcacggccagcagccccacgcggtcccgcgcttcggcggtattggcgcccacatgcggcgtcgccaccagggtcggcaggccccatagcggcgagtcggcaggcggcggttcggggttgaaggtatccaggccggcgccgccgatctggcccgtgctcagggcttttaccaaggcatcggtatcaatcagctcgccgcgtgcggtgttgatcagcaggctgccggggcgcatgcgcttgaactgcgcctcgccgaacaggttgcggttctgctccgtgagcgggcaatgcaggctgatgatatcgcagtccgccagcaaggcatcgaagtcactgacctgctcaacgttgggcacgtcaggcaggtttttcaggtaggggtcgtacaccttgacctgcatgcgcagcgggccgaccagctccatcagaattcgaccgattgagcccaggccgaccaggcccaaggtcttgcccgacagctcgacaccgaccgaggtcgctttatcccaatgcccatcgcgcatccgtgcatccagcagggcggtgtggcgggcgacgctgaacatcaacgccagtgcatgctcggcgaccgactgcgcattggcgcccagggcaatggtcacgggaatgctgcgttcggcggctgccgcaatgtcgatggtgtcgtagcccacgccgtgcttggcaatgatcttcaactgcgcggacgcctggatcatgtcccgcgtcaggtgaccctggcgcacgatgattgcatcgggctgttcgcgcgcaatgatcgcagtgagttcgtcggcgggtaggtaggggatggtcggtatgacgcgcacgccgtgtgaggcggcgtgggccatggcttcggcagtcaattcagggccggtcagcaaaagggttcgggtcatgttgcgcaccttggtttttttatctgtgtgcagctggggggcgagtgacatgaccctcagcggtgactaaaacctaacataatgaaacggcgttgcaattaaaaagatttttttcaggtgtgaatgccgttctttggtcatgccgtagtgcctgtttttttcttgataaatcagcattttatttttgaatgagctgattttcatgtcttggtgcagtcagcgtttacgcgacgagctgcacgcaatgcttgcttgcaagtcaaaaaatgaaatgataatttcgaaatagcgtttcattttaattattctgcagtcgcgccacggcttacaaaaaacataagaaggtgaccccatgtccattggtttcagagtgctcgaacaagctcgcaaagtgcccgccgaatgggttgagcgctaccggacggtgcccgtcgccaacatcagcgactcgatgaaccgcatgaccgccggcggcgccagcctgcgtgccatgcaccgtcagggtgtgttggtgggaccggcactgaccgtcaaggcgcgcccgggcgacaacctgatgctgcattacgccattgacatcgcacagccgggcgacgtcatcgtggtggatgccggcggcgacctgagcaacgcactgatcggtgaaatgatggtcgcgtatgcggtcaaaaaaggggtggccggcattgtgatcaacggcgccatccgcgacgccgccagtatcggtgccggtgactttccgctgttcgccgccggcgtcacccaccgtggcccttacaaggacggcccaggcgaggtcaacgtggcgattgcgattgatggcatggtcatcgaaccgggtgacctggtcatcggcgacgaagacggcttgctctgcgtgccgtttgatcaggtcggtgaagtgtatgatcgtgcccacgccaagcatgctgccgaacaaaagcagcttgaacagattgcccagggtgaaaacgaccgtacctgggtcctgaaatctctcatacagaaaggctgcgagctccctggctgatcccgctacaccctggccgccgtgttcggccagggttcacgggcagggcgtcgcaggcttcatacctaaaggctcgctgtgacttctgttcccgtctcccgttggcccgcgccgatccgcgcattgagccatcgcaatttccagatctacttcgtgggtcagggcctatcgaccctgggtaagtggattcaacaggtcgcactggcctggctggcttatcacttgacgggttcggctgtattgctgggcacgattgctttcctgacgctgctgccccaattgttggtcggcccactggcgggcgcctggtcggaccgccacgacaaacgccgcctattgatgggcgtgcaaaccctgcttgccctgcaatcgctggtgttggccgtactcacctggcagcaatggatgggccgggaggtgatcatcgtcatggcgctgattctcggcttgctcaatgccctggaaacaccgctgcgccaggcgttgatcagcagtttcgtcgacgaccccagggacttgcccaacgcgctagtgctgaacgcaatgctgatcaacgccgcccgctttattggccctccgctggcggggttgctgatcaactggagtggcgaagccggctgttttctcctgaccagtatcgcgtttggcatgttgctgatcgggctgggcagagtgagaagccgcgagcaaaccaaggcccagggttccaccgcagagattttccgtgaaggcctgcgctacctgtggcgcacacttcatattcggcgtttgctgatcagcgtgatcatggtcaacctgctggcctcttgttacacggtgctgttgccgatcctggcaaaaaacgtgttcgccggcgatgcgcaaaccttgggttggttatggggggccgccggtgccggggcgtttgtcgcgacgattttcctggcgtttgtcggcggtgcgtcgaacctgcaacgcatcatcggcgccggggcactggtgtgtgcgatcgccttgtgcgcgatagccgccaacccgccgttgtggttcacgctgatcgtgctggcgggcttggggtttggcatcaccgtgagcaatgtcagcagcaacatgaccctgcaaagcaccgcgcccgaggcgctgcgcgggcgggtgattgcgttctacatcgccatgcgtttcggcttcgaagcgattggtgggttgttggcagggctggcggctgcagccttcagcgtgcagtggaccttgttgctggccggtgcactgctgttggcgtatcagggcgtcagtggatggttgtcagttcgcaggcaccgttctggcagggggccgtcagggtgacagtcggttcgctgctttgctggcaggcgactcgacagaacgcggcgctttaaccgacaccgataaccgcacgttatttcatgtccctggcctggatccacagcaccgcatcctgggacaggggtttgcccttgtaggttttggtcgcgccgatgttgagcgccgcaatgccccaccagccagcgcgtggcaggccgatggtcacgatgccttgggcatccgaatacgtactcaaggatttgaaggcggcttggggggcagtgacatagtccttctggccaaaggcgttgtttttgatgtcgaccgcatgattgacgtactcgatttcgatctcggcgaatggaacaggcttgccgtcagccaggaccaacgcgcggaacaccccacccgtccagtttgcatacggcttgttcaggggttggatctcaaccgccaacccttggggttctgacccattgccgggcacgccgcccacgttcacgacgagcttggtgaactgttggatgtagacgccttcctcggtttccagatacggctcaggttcgagtacgaaaatatggtcgcccaggggccgcaccaactcccgtggaatcgacgcacgataggcggtcactggtttttcgcgaccctgccactggacgggtttgaggtattggcgcaggtcggttgtttttccgccgtggccgctgatgaggctgaaggccttgggttcacccatggccatcgtcggcccaccggagaacggatgcgtgaacactatagcgaagtccaggtcggccgcacgctgcagcgcggtttcgtcaaggtagagcatctggaagtgcgcttgcgctgcgcaggtcatgcaaccgaaggtcgcggcggcaaaggcttggagcagtcgtcgtttgatcagcatggtcgggctcactttgagatgtcagaggactggatcgtggcgccatggttttcaccaccgaggaattccaccgagtacgcgccggcgggggcctggaacgtgtagctgttgtccttgtcgacagtcccttcgagcaatagcttgttgctggggtcctggacatggatttttcgacctgcggcggaactgccgtcggtgtagccggcttcacatttcacccagtcatcgtgctcgatgtagcagtcgaaaacggggccgtgggccagcgcggcctggcagaacagcagggcacctgccagcagtatcgggtgggccagatctcgcggtttcataaggtttcgttctccatggtcgaagtggatcactgcggcgtcgccgtttgggcggcagccactgcgggagcggccggcgcgaaggccgccagcaaggcgtcgaggttggcactcagcagcgcctcgtagctgttggccgggttggcgagcatgcccgggttgccgctatccaggatcagcaggcgtgcgccgccgtcctcgatggcctgtgcaatcctggcgtcaggcgcccatttgtgaaccaccacgcggatatctcgctcgcgaaggtagcgggtcagggcggcgcggtcggcgtccgtccagtcgatgtcctggcgcacgaaccaaccgtccacatacacgccgaactcgccgaacaggtagaccggctcgctgaccagcgacagcacgcgcaggtctggcactttcagcagccgatcgccgtagtcggccttcaggcggcgcatgcggccgtcgagcgcagcgaggttgcgcgcgatccgtggcgcgtcggttggggacagccgtgccaggtcggcggcaatcaatgccgacatgcgcatggcattgatcggccccagccaggcgtaaggcgacgggccgccttcgccgttgcgggcgtctgcccagggcacatcgtttgccggcacgcgtgtcacggccacgccgggcttgaggctgtcccaagagtgcgacgcatcgatctcgacgatccgcaggttgtggcgccgcgccgtcgtatacaacgggtcggcgcgccacaggctgctcagggtgaccacggcgacggccctctggaacaccgccggctccaggcgcgacagcgcgttggcctggctttccaggggcacggcggcgtccagcgggacacgtacgacctcgatgtgcgtgccttcgccgagtgccgaggtgagcgcatacatcgccggcagggcgacgagcactggctgttgctcctgcgcaaaggctgacggcacgccacccagcagcagtgcgaacagtgccagccaagggcgaattgaagtgttgaaccttttcatacgctggcccctttgaactgcggcgcggtgccgcggatgagggtggtgaaggcaaataccaaggctgcgacgatcacgatggcgccgcccgtggggaccggaatatggaactgcatcggtgccagaatcccgaccacacaggaaaaggtcgcaatcaggaccgcccacgtgaccaggcccggcagtgagcggctgatgttgcgggctgcggctgccggtatcagcagcaaggcctcgaccagcacggcgccgatgatcttcaagcaggcgaccgttaccagggtgaccaacaccacgaacaggtactcgacgctgcgcacctttacgccgcgcgcatgggccaggctcgggttgaggctggagagcaacatgccgttgtacaggggcagcgcgatcagcgtgcaaatcaccgtcacgcccagcagtacgttcatgtcggtgtggtcgaccgccaggatcgagccgaacagcacgccttccatgacgtgtgtgttgattttcgcggacacgaacagcagcaatgaggcaccgaccgccagcgagatggacaggaacacgccgatcaacgtgtcattggccagggtggtgcggtgctgcgtgtacttgagggtcagggcgaacagcaggcagaagccgaacatcgagaagtagggcgaggtgtaggactcgccgatcagcacgccaatggccacgccggtcatcgccgcattgcccacggactggctgaagaacgccatccgcttgatcatcaccatcgaacccagcactcccagcagcggcccgatcagcactgaacacatcagcgcattgatcacgaactcgtattcgaacggttgcggcaacatctggctcgcggcgagcgcctggaggtggtcgcgaatgaagtcgtacagggcattcatcgaatggcctccagtcggctgtcgagctgatcggcagggccgtgaaacagcacccgttgattgataacggtcacggactgcgcgatacgcttgacctgttcgaggtcgtggttgatccacaaaatggtcaccccacggcggttcagctcggccactagcgcctctaccaggcgcacaccaggctcgtcgatcccggcggtcggttcatcgaggatcagcagccacggcatcgggctgatcgcctgggccagcagcacccgctgacgctggccaccggacaggctgccaaagggttttttacccatccccgccatgccggtacgctccagggcctgggcatgggccgccttggcggcgcggcttgcgccgaggaaggcgggccggcgttgacccaacagggccatgagatcgttcactgtcatcggcacgttgcggtcgaagtccggcaactgcggcacataccccatgggcgtcgtgggttcaccctcgagccggatcgttcccgaatgcggcatctggcccagcagcgcacgcaccagtgaggttttgccgccgccgttggggccgaccaggcagtgcaatgcgccggcctcgatgcgcatgctcacttgatcgagcacctgcgtgcctcccagtcgcagggagacgttgtcgaacacaatggcggggccgcgcatcgcgtgttgctccttcagcgcgttcattgctgcgtaaactcgacggcttgcgccagggtctcgaggttttcgcgcatcgcgacctcgaattcgtccgcgctgtagctatcgccggtgatatgagacagggcgaacaccttcacgccggtggcggcttcgatgggtttggccaggtcgagggagaagttcttttcggcgaacagcaccttgacgttggccttcttgatcgcctcgatggtgttggccaattggcgtgccgtcggtgcgacgccatggcgcggctcgatcacggcgcttacgaacaagccgaactcctgcatcatgtagtcgtagccggcatgggtcgtcgcacagcggaacgacgacaggtccagtgcggcgaagcgcgtcatgaagcctgcgcgcagcgcacggatacggccggcatacgccagcgcattcttgcgatactcgcccgcgttgtccgggtccagctcgcccagccggcgagcgatttcgaacacctgttggatcgctgccgtggtcgagacaaaggtgtgcgggttgaccaccttgaccccttcctggtcaccgccgatgggaatcagcgccaccgtggcattcgcctggataatcggcagcgtttgcgtgcggccggcggccttgatgatctggaaggcccattcatcgtgcccgataccgttgaccaccagcacatcgatattcatcgcgcgggtgatgtcatcgggttgcggctggtaattgtgcgggttggcctctgccggaatcagcgcaatgacttgcgcccgatcgccgacgatattggccacgaagctgtagtagggatgcagggtgataccgattctgagtggcttcgccgaggcgaaggccgggccggcgagtgcgatggcggtgatcagcacccacagcgcgatgcaacggcgccacacggcgcgatgtttcgtagaaacagtcatggctgggttccttttacgcgttcgatttcgctggcaccgtcgtacgggatgacttggcgccaaccatcgccgaccagggattccggcttgacgatggcggggtagggcgcgttcgggtcacggtggacccagatcgtcgcctggttggcccacatcacaccggcgtgggcgtggccgatgatcagcaggtaggcgctctggcccggcgcgtggccggctgagccgtaatagaccgtggcgccctggcccagggtggccttggacacatcgctgacggcaggggccgccgccgtggcgtcgtccgctccacccggatgggccaggtgggtgccgggcagaatcaattgccagtgcacctcgccattggccttccagaaagcatcacggtagaacggcggcagcaacagctcctgtgcacgctccagggtgatccagccgccggtatcgttgttgttccagatgatttcctcgccggccggcagcaaggcgctgtggatggcctgatcgaccgcacccaagccgtcaaaggaacgcacctgccagctcagtggggtgggggggccgactctttccgggcgcagcatcacatagccggccacgctggcgatgacggccagggtcgccagcagcaggcccagtgactcccatgcgccggagcgtggtcgcacctgggtgatcgcagcggctgggcgcgccatcagaggaacgcaatccagcggcccaggaagaccacgccggcccacaacagcaacgagctgaacccggcgacacgcgcctgacagggaggcggcagcgtcgtgtcccattcggcaattcggcgaaaggcgcccaagtggaacaccgccatgttggcgccggccagcatcagcaggcccattttcagcaggaacgcggtgttctgcacataggtcgtgccattggcacagaacatcagcaggccggtgatcacgcaggtcacgaacgcgacccaggtgtagggcagcaaatcctggatcagtttcagcgcgccgcgccggtgggcggttacgccaagcaggcgcaggtcaacgacggcgatggtgccgtagacaatggcgatgccgattacgtgcaccgattccagcattggaaaggccgagcctgactcgcggatgaacgtcgcgacaggcgtgtcctggatggcttgcagcaggggttgaatatccatggcgaatacctgagaactttcgttgaaaacacttagatcgtgtaggcgatccagcgaccgcaaatgatcacgacgcaccacaaaccgatcgacagccatgcgcatgccttgaccgaacgcgtcgtgtcgtcgctgcctgccgtgccggcagggcgcagcaacggacgccgcagcagccaggtcacgctgaacgccgtcaccaccaggaccatcttcagccagaacgtggagttgacgagtacccggtcaggctcggcgatgatcatcagcaacccggtacacagcagcacgatcagtgcattgcgcatccacgggtagtaacggcgaacgatgccgcgcaagggttcctcgcgggcgaacacccccgccagtcgaaggtcggagatgagcgccgagccgaagagcacggtgatggcgatgatgtgaatgctctgcaccgtggggatgacccacaggatgtcgcggatcgcagtgctgaacggtgaggcgtagatccaggcaatgatgagtgaagatgacatcggcttttcttccgcagtgggttagaagtcttgaggggttgcgatcggatgcagccccgccgcgtcctccggcagcaagtagccttccttgatcgaagccgctttggcgtcttcgaatttctgtgcatagcggctgaagcttccatagtgcttgcccagcacttccttcgaataaggcactttggtgtcgtagatcagcccgcagccggtctcttgatcggtgaggtaggtggcgctgggcacctggatccacggcgggcgcacaccgccttgcaggttgccggtggcgggcgcccgcgcggcggccttgccatcacggaccacccggggcgcgcggggcatgggtttgccgtcgcgtacccattggtccatgccgtcgagcagtgccgagaccacgtgctcgaccggttcgtcatacagcgtctggcagcgcgggtcgtcgcccttgccgacgtcggccgcgagcggttcggtgtgctctgtgccgaggtcggccaggcgcagatggggcatgccggtcacttcgtagtagcgaagctgcggggtgtcggtgtcgggaggcagtgggataccttcgatcacgtcgtgcatcagttcggactggctgaagacggtcacgaacggcacgccttcgggcatctggcgaggtactcggatcacatcgccgccgacttctccgtaggccatgcggcccgtcatgtaagcgtcgatcagcggcgtatcgtcgggcatgcgccattgctggtgacgcccctggtcgagatagtccatccagacctgcgcggtgacggcccagctattcacatacacgcgctgcacatcgaggcccgccagcggactctgcgccccattgctcttgagcagcagcgccagttgcgcaccgatgccctgggactgtggcacgaagggatcgggcgctgcgccacgggtgaaccgtgccgggtcgtaataggtgcccagcggcgcatagcgcgcgtagtcgaagcggcgcatgaactcgaaattcacgatccgtccgtactggtcgatttgcgccgcctcggccgccggggtgtccgaaatgaacttggggtcgactgacggcttgttcacattcagtgtgtacccgacgtacgcatagccgcgccgcagcaagtagtcacgcgtcagtatccagcctgcgccacgctcgccgaaccagctgaacggctcgatcaccaccgtgccattgaagcgcgccgggtcggccggtttgcgcaccagaatgcgcgtggtgtagggcgcttccagcaaggttttaccggcggcagtgatggccggggcgacgccttgcaggtagtactcttgctcgatgtagccgtagtggtcgaggtcgctgtactcagtgcccgggcgtgtcgccgacgacagcggcggcttgtcggaaggcggcaccgcgatggccgtgggcatgcgcggcacctcggcgagcacgctcgacgcgatgaacagcgacaacgcgatgctgatgggggtcaggcgtttcattcgcaaaagctccggcaggggtgggagggtggcgtcactcaaggctcagggaagccttgccctcgctgtcgatcacgatctggttgttctcgcacacgtactcttgaatggcgtagttggagcgcttgtactcgaacgtaaagcgatacggagtgttgagtacctgcgggtcttcgatcaggacctggttttccaggtgatccggcccgcgcaaccgcatgcgttcagtgatcttcatcgccggcccgtggggcacgtcgtagaagcgcacatcggttcgcacgcgctgggtctcgacgaccagcgtgtcgccttcccagtggccacgcgaatggccctggtacaacgggtcgagcttttccaggggcggcatgggctggttcaaaagaatccgccgcacctgctggagatactcgccgaggatgatcacttgcttgtcgtcgcgaatgatctggatcgggaacagcgctgccatcatcgtcggcatgccctcgggcaggcacttggagctggtggttgcaatcggcgtgccggcctcgttggccacggcttctttcttcttcagctcggcgtactcggcggcgtaggacgccttgaggtccattgggccgccggggtgcaccgggtcgtccgggttctcgccgaaccagtcgtccggggttctttcccaggtgccgctgatgtctggccgtgtggccacgccgtgtttgtcggttggggggtttgacgctgtcgcggcgctgctcatcgcggcgaaggtcaggaggaccacccccaggaagaccatggcggtgttggcggtgcgtgctggtttcattgaaatgtctccgcgttgctggtttgcccagttctgttgttgtcgtgctcgcaaagggttgcgtttaaccgccgcccgagagcaccacgtcgcccatcttgatctccaccagcagcccgcccggttcgccgtttttcaacggtttgaacgacacctcggcgtttgcgccggccttgaccgagtcggcagtccagcctgtgcgctgcagcgcgttgacgctgcccgtctcgatcttgaagcgctgggccggcgggccgggaacatcgacgtagatcgtgatgtgcgggttggtccaggcgaagcgctcgaccacacccttgatcgtgattgtctgggtctggtcgaacagcgcgaaggaatggtgggcactggcaacaggcgccaaggcactgcaggcgatgagggtcataaggcaaagcctttgacggagcgacggaaagcgtgacgaaggggtcatgacgggtgcctcggtttttatggttcttatgggcccagcatagggtgctcgcgctcactggccgtagccgaaaacggcaaccattgaaggtattcagggggggtggcgcaggtgaggtatcgcgcaacgacagaacgacgcgccggcccgtgcagatgctgatttgggttaccgcgttggcgacccctgccggaacactcgtgtctcgcctcacaactataaaaacaggagagacgtcatgcgcattcccccctacgcgccattactgtcgctggttgcactctgtgcagtcggctcacaggcacaggcttatacgctgtacaacgaagacgacggagcaaccgtgttgaatgccgacctgggcgccgcattcggctggtttggcagtacccataactacctgggcgatccgcagaaaaaatccggcggcatgcactggcaggagggttacgtcaaatacggtctgaccggcaccacggataagctggttgccggttcggtatatggtggcttcagcctgctcagcagcgggtcatggggtgacggagacatgggggcgaccacggcgggcaatgagcgacgaaccgccgtggaagacgcgttcctgggctggcgatcaggtgacctgctacccgccctgggcaaggatggcgtggatttctcattcggacgccagattgtcacggtggacggctttctgatcaccgacgatggatttgacccgggtaacgccttcaaccccatcgagggcgtgcaggatggccgcttcaaccgagggggcgccttttacctgggccaacgcctggcgtttggcaatacggcggtgctgaagctgggcggcaaggaagggttgcacggcagcttgatatggctgaagtccgataaccctgggcagtccaagaccgaactggccgtgggcactatcgattacaccacccccatcggttcgatcggttcgacctacgtgcacggcctggatgtggaagagaaatacgccttcggcgatcggcttgagcgcaagggcatgaacgtctacagcattcgcgggcagggcaacgccgggatcgagaacgccgattttgcgttcgaggtggcccgccaggaaaaacgttcggggtcacagcgggcgatgttcttcgacgcgggttacaccttcgtcgatacgccatggcaaccgacggtcagctaccgctattcgcgctactccgaaggctgggacttcctgttccagggcggttatcgcaagcgcctgcagggcgaagtcgggcttaattatgcgggctccgtgacatcgaacatgcagatcaacgacgtactgctctcggtcaagccgaccgagaaattgacccttaacgcgatggcgttcgactaccaccagctttcccgccgtcatgagctggatttcgctgcgcaggagctcgatctgtttgtggattgggcggtcacggagaacatcacgctttcgccgctggttggcttctacaagccgcagaagtggctgggcaacggtggccggcagagcggcgacgcatcaaccaacacgtacatgcagttcattgtgtgggcgacgttctgatgattcattgaggtttgttgcggggccgagcaggcgttgacgttttgcgtcaacgcctcatcccgtcagagcatgcggcgcaacacatcgttgcgtgggtcccggtcatagaagcgatgcttgagcgcgcccgccacgtgcagcacgatcaggacaagcaaggtgtaggcgaggactttgtgcagccattggaagaccgcgaaccaatcgtcattctttggcaacagctccggcaggttaaccccaaaaaagaacaccccgtcgctcatcgtgtacgtgctcgacatggagtaccccatcaagggcacgatcaccagcagtacatacatgacgcgctgcgtcaggcgtgacaaaaccctttcgtaccccgccagcgtttccagcggctgcggcaacctgggcgtgcgcaagcgcacagcgagctgaaccagcaccaccaggaacgtcaacaccccgaaggacttgtgccaggggtagtaaagctcgtatttgctcgccacctcatcgttcatgccggtcatatgccagccgacccagagcaggcccaggacgagcacggcacgtacccagtgcagcacgcgcagggaggtcgggtaccgatcgattgtcgattgatctattgggttcatatcaggctctccacggagcgatgcacggttcaatggccaccctcgacgtgggagggtggctcggtcagggcgcggtgatcaggtgggcagcagcacggtgatgactttctcctcggtgtaggccagtgcgccgctgaacccgccttcacggccgatcccgctggtcttgaggccgccccacggcaggttggcgtccaacgggctccaacagttgatccccacggcgccggcttttaccgccgcggcgacgcggtgtgctctggccaggtcgccggtccagaccgtcgccgccaggccgtagctgctgtcgttggccagggcgatcgcttcggcttcgtcgtcgaacgttatcagcgtgccgaccggtccgaagatctcgtcccgggcgatttgcatgtcgttgcgcgcgttggcgaagatcgtcggacgcacgaaccagccctgcttgggtgtcgatacgccgccggccaacaaggtcgcaccttggtcgatgcccagttggatgtagcggttgacgcgatcgaattgggctttcttggcgaccgggcccatctgcacgccgggctggcgaggatcgcccacgttcaccgcttgtgcagcctcggccagcgccgcgccgaaccgctcggcgatgctgcgctgcaccaggatacgcgaaccggcggcacacacctggccctggttggcgaacaggccgagcgcgcagccgcgcagggcgtcgtcgaaggatgcatcgtcgaacacaatctgcgggctcttgccgcccagctccaaggccacgcgcttgaacagcacgccggcggtgcgctggatttcgcgcccggcctcggggctgccggtgaagctgatcttggcgacatccgggtgttcgcacagggctcgacccacttcattgccgtagccggtgaccacgtttatcacgccgtccgggaagcctgcttcctgcgccagctgcgccaggtacagggctgactgcggggtttcttcggaaggcttgatcactacggtacagcctgccgccagcaaggcggcgagcttccacaccgtgatcatcagcggtgagttccagggcacgatggcgccgaccacgccgactggctcgcgcaccgtgtacgacagggtcttggtgccgaagtagcccccagtcggaatggtccgaccttcaagctggttggcccagccggcggcggcgcgcaggttggcgatcgcgttgggcaggtccatccggcgtggttcgatgggcgagcgcccgatggcgttggcgtccagatcggccagcacgtcagtgtcacgctcaaccaggtcggccagtttcgacagcaaccggccacgcagggcgccgttgagctggctccagtcgccgctttcgagttggcggtgtgcagcggctacggcacggtccacgtcctcgctcgtaccccgtgcgcagtcgccgtatacctgctcggtcacggggttgacgaggtcgattcgacgacggtcgaaggcttcgcaggaggcaccttcgataaaatggttcaagtgctcagtcattttggggtccttgagtgatgggcaaaatcaagccttcagggcagccagggcgtcgccgaagatatccagtgccttgaagaacagctcacgcgagatcgtcagcgagggcatcacgcgcatcacgttgctgtaacggccacaaggaatcatcagcacgccgtggttgagcaggtagcccatcagttggccgattttctcgcccgccaggggcgccttggtgagcgggtcttcgatcagctcgataccgatcatcaggccgcgcccgcgcacttcgcccaccaacgggctgttgaaaccacgaatatgcgcctgtgcctccagccccaatgtgtgggcgcggttgagcaggtcgagttccgggtcctggaggatgctgatgttggtcagtgccaccgccgccgacagagagtttgccgcgaaggtgttgggcatggagccgtcgggaatctgcgccgccaggtccgagcgcatgatcaggccggccatgggcaggtcgctgccgatgcccttgccgaaggtgagcatgtccggtttcacgcctgaatgttcgaccgcccacatcttgccggtacgccccgcgccggattgcacctcatcgacgatcagcaacgtaccgctgcggtcgcaggccttgcgcaacagttgcaggaattcgggtgagggcggcacgtagccgccttcgccctgcactggctcgacgatcacggcggccacgtcatcggcggcggtgtagggggtgttcagcaggtagtcgatgtactcgccggcgatctgctcggcgcttttgtgggtggtgtcgaaggggaaccggtaggcgtaagggtagggggcgtggatcacgccgcccatctgggcaccgtagcctttgcggtacgcggtgcccgtggtcagggagcccgatgcgttccagacaccgtggtagccgccatggaaggcgatgatctggtggcgtccggtgatgcgcttggcgaacttgatcgcggcttccagcgcgtcgctgccgctctgggtgaagaaagtgatgcagtcgccacgcaagccgtcgggcgcgatctcggagagcttggcggccagctcggtgcgtcgggtgctgttgatctcgagggcatgcatcagcacttccgactgctcgcgaatggcttgcaccaccttcggatggcagcggcctacgctgctgacgccgaccccggcggacaggtcgatgtaggtattgccgtccggatccttgaaggtcgcgcccaatgcgcggtccatggccaccggcatacgtccgccaccacgtgccattgactcggtgcgcgccgacagcgccagggcttcgagggtcctgggcccaggaatggtctcggagatgatccgtggggcatccgcaaaatgcagggattctagtttggcttcactcatgacggtctctctggaatgtcgattcaagtgtgccgatcatctccggggtgcattccagacgggtagcccgaatcggcacatgggaaagcgtgtccgtggcgggctgctgccaatcggaaaagtgacaaataatttgcaggatttctgctatgtgcgaatatcacctgggaaggcaagctaaaaataagaatatcggcagaggctttcggcattatgaaaaaccagaccatcagccattcccaggacattcacgttcacgccgccactgttcagcagtggagccaggactacagccaattgacggctgggtccgccgaatgctcactcatgcagttgacgaccgccggttgccacgtattccgcgagcagatcaaccagcgtgtcgtgcaacacggcgtctctccccgaggcaagatgtgttttgcggtgccgatcaatgttcccggtccgattcgcatgcaagggcgggaggtggacgacagcagcctgttctttctccatggcggcgaggagttcatgttccacatgcctctgggcatggagctgttgtccatcaccttcgagcgtgaactgttcgaacaggccttggcgcaaaccgcttcggcgaaggagctcaacctgttattgcgccaaccggtgatccgggtttcggccacacggttcgcccaggcgcgtcgtcgtctgctgacgctgttctctcaggccctggtgcaggaagagctggacagcacgcgcgatttgcaacgcgagcaggcgctggaacaggccatgttgggtgagctgctgcaactgatgactgacccggcctgcgacaagcaacagcgctccaccagttccacgcgcagttttattgtggagaaatgccatcgcctggcgaccgagcagatgctgaatgtgccgagcgtcatcgagttgtgccagcgtctacaggtgagtcggcgcacggtgcagaacagtttccgttcggtgactgagacgacccccctcaactacttgcgctcggtcaggctcaacggtgtgcgccgcaccctgatgtccactcccgcgtcccacctcaccatcggcgatgccgccgctcaatggggcttctttcacctcagccattttgccgccgaataccatgagctgttcgcggaattgccctcccatactgcccgtgccgccattacgcgttgtgcttcggtctgatcgaactcacaaggatgtagaacatgaatagcctgcgccgcctgctggcggtcttcgatttgtttcgcccggaccagcccgtcattgacgtcgacatcatttgccgggaactcggttatacaccggccactgcctaccgttacctgcgagagctgggggatgcgggtttattgaagcggttgccccggggttatgcgctgggcccgcgcattgtcacgctggagcaattgatgactcactatgatccgctgctggcgtgcagtcaggacctggtcgaacagttggtcgccgacacaggcctggatgcgttggtcagtgagtggcatggcgactcagtggtcaatgtactggtccagcgtggcaccgatgccggaccggtgggcggcggcagggggcagccgatcagccttttccacagcgcgacgtcccgggtggtattggctcacttgctgccacgccagatccgacgcgtgtatgacgctcacgctccggtcgctgacagcccgcaacaagggctggaatggaagaccttcaccaagagcctgcttgccattcgcaagcaaggctactgcgtcagcgacggtgaactgcacccgggacgcagtggcgtcgccgcgccgattttcgacgacaagcggcgggtcatcggcagcatgaccctggtggggcgcagtgaacgcttccatgcgttccagcagagctacctgcgttacctggtgaccggcgcggcgtcggagttgaccagccgcatcgccttgcgctgagggcggcggggcaggcggcgcgacagatgaccgatttgggctaccgaagcgttcccggcaggcctaggatcaggccctgcgtgcgatcagaacgacaagcgactcggtgacggtgcgagatggactgcgccgatcctacggtgactgcctcatcctataaggtcaacaaaatgagcgtgactttgccccacaatacgccccacaacccgccccacaacgcgcccccaaaaaaacccgacgaaaccctcgacacgacgtcgcccaaccgctctaccgagctcaagcgtggcgccctgggtgtcggtttcatcatcttcttcgtggtgtcggcggcgagtccgctcagtgtgatcgccggcggtttccccattggcatcatgctcggcaatggcgcgggcaccccggctttgctgatcctcgccttgctcgtgctgctggcgttctcggtgggctacaccaccctgtcccgacatatcaccaacgccggcgggttctacgcgttcaccgcccgtgggctgggtggcctggccggcggcgctgccggggtattggcgatgtttgcctataacatcctgcaggtcggcttgtatggcatgtttggcggggtggtcagtggcaccatgcaaagcgcattcggcctggtattgccctggtggtcctactcgctgatggcgatggcgagtattgcgatcctggggtatcgcaagatcgacctgtcggcgcgggtgctgtcggtgatggtgatcgccgaatacctggcgatcctgatcctggatttcgccattctcaaatccggcggcgacagcggcatcaaccttgattcattcagcagccaccacgtattcagcggcaccccgtccatcggtttgctgttctgcttcgccgcctttatcggctttgaggccaccaccatctacggtgaagaggccaaggatcccctgcgcaccatcccacttgccacctactgttcggtgttgctgatcggtggtttctacgcgttgtcggtatggtcgatggtggtgggggtgggggcggacaaaatcgtgccgatgctgcaggcgttgcaggatccgaccacatttatctatggcatgtccgaccactttgtcggcccgcacctgacccaggtcatccgcgtgctgttcatggtcagtatctatgccgggttgctcgcctttcacaatgccgccgcgcgttacttctacgccattgggcgtgacggtttgttgcaccgccagttgggcaccacccatcgcgtgcaccagagtccccatatgggttcggccttgcagagcctgatttcggcggtggtggtgctgattttcgctgcgatggatgccgatccgatcctgcaattgttcgcctggctgtccaacctggcgacgttgtgcgtgatcttgctgatggctctgacttctgcggcggtgctggttttcttccggcgccaccccgagctcaaggtcggtgtttggcgcgggcagattttccccggtttctcctgccttgcactgtgggtggtgctggtgctggcggtggtgcatttcgatgtactgaccggtgccagccaactgttgtcctacagcctttgcgccattattccgctggccctgttgggtggtgtgttcctggcggccaggctgcgcaaagtatcccctcagcggttcctggccctgggcagccacaagctttaaggcgcggcctgcgctgctggcttgctcagcttgaccagcagcgctgcaatcaacagcagggctgcggacgccgccagcaccgcgacaaagcctgcgtcaaacgccgaacgggcggccgcgctcaacatcgcgcggccttcgggcgacaaggtttcagcgaccaccagcgcatcgtcaagactctcgaatgtcgccgggttgcgggtcagccacgctgggatcatcacgcccgccgcattggcatagatcgctgacagcaggctgccggcgagcgtcacgcccaccgcgccgcccagctcaaaggacacttcttcgatggacgccgccatgcccgcctggtccgcaggcacgctgagcatgatgctactggatgaagcggtcagcgcggcgccaatcgtaaagcccagcagcgcgaggctgatgatttgcgcaggtgccgtagcgttgtagagcaacaggtaggacagcatcgccgctgacgacaacagcaatgtccagaacagcatgcgttggttcccgaggcgaggcaggtaatacccggcaagcggcccggagatgaacgagcccaggggcagcggcaggatgaacaatgccgcctccagcggcgacaagcccagcaccagttgcaggcgctggctgaacaccagttccatgccgatcaacgcagcggctgataccaccgctgaaataaccgcgtttctgaaccccggcgccttgaacagcgcgaggtcaagcatcggttgtgtggctcggcgctggcggcggatgaacagcgtcagaaacagcgtgcccagggccattgccaccagcatgccctccaacgacgctgcccgcttgccgagctccttgacggcatacgccacgctgatcaacccgatcatcacctggagcgaccccagccagtcccagcgtttgctgatatcccccggatgattggggatcaacagcgcgcccaccaccaacgccaccagcacaatcggcacattgatcagaaagaccgaaccccaccagaaatgctccagcaacaggccgcccaccaccgggccgaacgcagcgccccctgacgcaaccgaggcccagatgccaaatgccatggcctgttcgcgtgggtcgctgaacgtcacgcgcacgatcgccagcgtggcgggcatcatcatcgccgcgccgaccgccagaaacccacgcgcgccaatcagtacgccggcggtgggtgaaaacgccgcgatcagcgagaacaggccaaatacgccgagcccgccgatgaacaggcgtttgtgcccgaggcgatctccgagcgtacccatgcccaacagcaggccggcggcgatcagcgcataaatgttgacgatccacagcttctgcgaagccgaagcgttcagctcgcgggtcagcgtgggcagggcggtgtagagcaccgtcatatcgatgacgatgagcagcaatgcgctggaaataatcgcgaggatcagccagcgtcgaggagaggtcatgggacgcgctcggtgatggaaagaggaaagccggtgccggtcagtctgtataagccgccggccccttacacacggaaatgggccaccagttgttgttggtgattggccatgtgatgcagtgagtcgctggcttttgaagcatcgtccatccggctggcgagtgtttcgctgataccgcggatgtcgctgacccgatggctgatgtcttctacgacggtgctttgctccatggcggcactggcaatctgctgattcatctgttcgatcacgtctacggcctgggagatgcgctccagcgccacccgagtctgttgcacctggaccacgctgccgctggcttgctcgcggctcagttgggtactgtgcaccaccgactggctcagctgctgcaaggtctcgatcaccgtgcgcacctgttcgactgaatgctgggtgttgctggccaggtgccggacttcgtcggccaccaccgcaaaaccacggccctgctcgccggcccttgccgcttcgatggccgcattcaaggccaacaagttggtctgctgcgcgatggaactgatgacgtcgaggacctgaccgatctgggcactgctgtcggcaagcgcgttgacctgcccaagggtggtttccaggcgctggtcaagggcctcgatactgcgctcggcggtcgagaacaccgcctggcctgagcggctcgcgctttctgcggcggtggcggcgtcggcagcactgtgggagtggcgcgccacttcctgtgcactggcgctcatttggtgcagcgcggtggccgccaactccacctcgtgatactgacgctgcatgccggcactgacttcacgggctatgccagacgaggtgtcggcgctgttgcgggtgtccagcgacgcgctctggatatcgcggataatcggctgcaacgtgtccaggaaccggttgaagccattggccaagtggcccaactcgtcgtgcctgccgacgggcaggcgctgggtgaggtcgccgtcgccttcgacaatcgcatccagcaactcggccattttcagcagtgggcgtgtcacgccgtgagcggccagccagatcagcaacatgcccaggctgctggcaagcatgcccaggcccaggttgagccagttggactcacggcttttgctgtccaggtcgttttgcatttgccgggcaggtgcctgcacccgtgcctgcgggactttgatcgccagttgccaggccgggccgcctgccacggtctgcacggactgacgtatatcgagggtgtccccggagacttcgccactgcgtcccgccacttggcccgaggccgacacaatggcgacttcgctgtcgccctggtacaggtcctggccgaggttggcggccagcttctgcaacgtatcgaggctgatatccatgcccacgacgccgagcaccttaccgttgacgatcaacgggatggaaatgctgctcatcagggtgttccggccttccacttcgatggtgtacggctcgatcacacacacccgtctttgcgcttgagggcaggcgtaccaggcgtttccgggttcgctgccgggcggcgcggtgttggcggcgatttgtgcctcgctcaacacctcctgcaccaattgccccggctggctctgcgaccaatacagcgcaaagcgcccgctgtcgttccccgccattgcgcgttgaccgcgccaatcggcatccgcgccggccagtgcatcaggcagcatgatgacgtacaggccgaggactttttcgcgctgtttcagggtttcacgggccgtagcgatcaatgcttcgcgcaattgcgcgaccgtcaggcgcccattgagtgtctgctcgcgcagttgcagaacctgttgcgcgaacccttcgccatacaaggcggtttcgttgaaaaaacgctccacctgttggccatgcgcaacggcctgggcctgcaagcgttccagcgcagcctgcccgagcaacgcgttgctctggtctttaagcagctttgcactggttttgttctggtacgcgctggcgccaatcagcgcccccaccaccgccagcaggcagagtccgctcagcagtgtgatacgccattggagggtgaggtgagctagacgcatggctgaggcttcctgcagagggctttggcggcgatgggctgggcagcgagccctggtttttatgcttgttgccggcacccgggcatagcgcgggtgatcctaggttgcggggatgacaggccaggcggctatcccaaatcggcaaggccggtgggattgcccgtgcagcgccgacctgttttggggcggggctgtggatgctaccgatttgggatagcgagcggttcgggggcgggcataggatcaaattcagcgcgtaaccaaaacaagacgctacccggtgccgatgcggtgtggtcgggccaaccctaaagcgactgcctcatacaataaggtcaataacatgagtgtatctatcccggtcaacagctccacggagctcaagcgtggcgccctgggtgtgggcttcatcatctttttcgtaatatctgcggcgagtccgttaagcgtgatcgccggcggcttcccgatcggcatcatgctgggcaacggcgcgggcaccccggcgctgctgatccttgccttgctggtgctgctggcgttctcggtgggctacaccaccatgtcccgacacctcaccaatgccggcgggttctacgcgttcaccgcccgtgggctgggtggcctggccggcggtgctgccggggtgctggcgatgtttgcgtacaacatcctgcaggtcgccctgtatggcatgttcggcggggtcgtcagtggcaccatggaagccacgttcggcctgctgttgccctggtgggcctactcgctgatggcgatggcgagcattgctatcctcggttatcgcaagatcgacctgtcggcgcgggtgctgtcggtggtggtgatcgccgagtacctggcgatcctgatcctggacttcgccatcctcaagtccggcggtgacagcggcatcaacctggattcgttcgaccgcagccatgtgttcagcggcaccccgtcaatcggcttgctgttttgcttcgccgcctttatcggttttgaagcaacgacgatctacggcgaagaggccaaggatccgcaacgcagtatcccgattgccacctactgttcggtgttgctgatcggtggtttctacgcgttgtcggtatggtcgatggtggtgggggtcgggtcggacaaaatcgtgccgatgctgcaggccttgcaggacccgaccacgtttatctatggcatgtccgaccactttgtcggcccgcacctgacccaggtcatccgcgtgctgttcatggtcagtatctatgccgggctgctcgcctttcacaacgccgccgcgcgttacttctatgccatcgggcgcgacggcttgttgcacagcgtgttgggcaccacccatcgcgtgcatcagagcccgcatatggggtcggcgttgcagagcttgattgcggcggtggtggtgctgattttcgcggcgatggacgctgacccgatcctgcaactgtttgcctggctgtccaacctcgccaccctgtgcgtgattttactgatggcgctgacctcggtggcggtgtgtgtgtacttccatcgccatcccgagcttaaggttgggatgctgcgcggacgcatcctgccggggttctcatgtctggcgctggtgctcgtgctggtgctggccgtggtgcatttcgacgtactcaccggcgccagccaactgctgtcctacagcctctgcgcgattattcctgcggcgctgattatcggcattgtgctcgcaatgcgactgcgatcgcgctcgccgcaacggttcctcgccttgggcagccacaagctttaagagcgcagcggttttatagctcgactaaccagacaattgcagcctgtcgttgctcggcatggctcgtcagcgtgtgaaaggaaggtttcaaatgcacaactacaagatgctcatcgatggggttcaagtggccggtgaacgaggccagtttgacgtggtcaacccggccaccggcgctgcatttgcacaatgcccggcaggctcgctggggcaactcgaccaggcggtgaatgccgcgcaggcggctttcaaaagctggcgccacagtagccacccagaccgttgtgaacgtttgctggcgattgccgccgatatcgagcgcgaggccgacgcgctggcccgcctgattgtgcaggagcaaggcaagccgctggagctggcgtttggcgaggtcatgggggccgcggcgtggacccgctacgcggcggctcaagacattgcggtggagctggtggaagaaacccccacccaacgcatcgagctgcaccgcaaaccgttgggcgtcgtggcgtcgatcaccccctggaactggccgttcatgatcgccgtctggcacatcatgccggcgctgcgtgccggcaactgtgtgatcagcaaaccgtcgagcctgaccccgttaagcacgttgggcctggttgaaatcattgcccgccacgtgccccgcggggtgatcaactgcgtgacgggcgagcagggcttcggcagcgcaatcaccgcgcataccggcatccagaaaattgtcttcaccggttccaccagcaccgggcaaagcgtgatgcggggggccgccagcaacctcaagcgcctgaccctggaattgggtggtaacgatgcggcaattgtattgccaggaacgccggtcgaggcagtggccgaagagatcttccaggccgcctttctcaacatgggccagacctgtgcggccctcaagcgcttgtacatccacgaatcacagtaccaggcctttgccgacgcgctgacgcagatcgcagcgcgccaggtggtgggggatggtctcgacgccggtgtcacgttcgggccggtgcagaacctggagcaactggaactggtggaggccttggtcgccgacgcacgcgccaacggcgcacgggtgctgtgtggcggggcgcgcctggatcacccgggttttttctatccccctacgctggtggcggacgtcaccgatggccatcgcctggtcgatgaggaacagttcggccctgtgttgcccttgattgcctaccgggatgtcgaagatgtgctgcagcgcgccaacgctggtgacatggggctcggtggctcggtctgggggccggatgtcgagcaggcccaggccttggccagtcgcctggagagcggcgttgcctgggtcaactgccatgcgcagatccagcccaatacgccgtttggtggcagcaaaatgtcggggtttggtgtcgagttcggccttgaagggttactggaattcacaggccagcaattgctgttcgtgcgcaagcgcgatcccgcccaaggagcttgaacatgtacgaaaaatacaagaccgccgagaaaaagttctggcaccccatggggtccagtgccccggcgcagcgcgccaaaacgctgatcatcgcccgaggtgacggcaattacattacggacatcgacggccagcgcatgctcgacggcgtgggcggcctgtggaatgtgaacattgggcacaaccgtgccagcgtcaaggcagcgattgccgcgcagttggatgaattggcgtattaccagaccttcgacggcattgcccaccctcgggtgttcgacctggcagaacggctgaccaccctgttcgcccaggaacgcatgacacgggtgctgttcagttccggtggctccgatgcggtcgaaaccgcgctgaaaatggcccgccaatactggatcgccagtggcgaaccggggcgcacgcggtttctgtcgctgcgtaacggctatcacggtgtgcatatgggcggcacatcggtgggcggtaacggtgtctaccactacaaccatgggcagctgttggccggctgccatttgctcgacaccccatggctgtatcgcaacccctgggattgccgtgatcccgaagcgctgacggcgcactgtattcggcaattggaggagcagatcgcgttgctgggcgcgcagacggttgccgcattgatcgccgagccggtgcaaggtgccggcggggtgatcgtaccgcccgccagttactggccgcgcctgcgggaggtgtgtgaccgccacggtattgtgttaatcgccgacgaagtggtcacggggttcggccgttccggctgcatgctcggcagtcgtggctggggcgtcgcgccggacatcctgtgcctggccaaaggcatcacggccgggtacatcccgctgggcgccacgctgttcaaccaacgcatcgtcgacgccatcgagaacgggcctggcttcagcagcatggtcatgcacggctacacatacagcggccacccgaccgcctgtgcggccgcgctggcggtactggacatcgtcgaagccgaggacctgccgggcaacgcggccagagtgggtgcgtacttgctggaacagctcaaaccgttgaccgagcgctacccggtgatcggcgaagtgcgtggcaagggcctgatgatcgcgctggacctggtggtcgataaggccacgcgccaccccctcgacccggctggcggccaaccctcgcggatcgccgacgaggcgcggcgtgccggtgtgctggtgcgaccgatcggcaacaagatcattctctcgccgccattgaccctcaccaccgatgaggcggacttgatcgtctctgcgctggatatcgccttcaccagctacggctagtcgccgttaaaacggtgcggcaaaggctgcacccacgtcatgccaatacttaagacagccttttgaaaggcgcacctccaggagcttgagccatgcggtatccattgcgtcgtcccgtgttcggtagcacgttcgtgtgcacattggcgctgtgcgccattcaacaggcccaggcctatgaggtgtacagcgacgacagccggcacctcaacgcggacatgaccgcggtattcggtcagttcaacagccgcaagaactacgatggcacctcgggcggctccacatggcgcgagggttatatcaaatacggcctgagcggtgaccaggccttgggcggcaatggctccgcgtatggggcattcgcgctggtcagctccgccacctggggcgacggtgatccgggcggaaacagcgtggggacagagcgtacgactaaaatcgaagacgcctacctggggtggcgctccggcgatctgtttccggcgttgggcaaggacggcgtggatatctccggcgggcgtcaggtggtcaaggtcggtcgcggcttcctgatcaacgatgacggactgaacctgggcaaaggcccggccgatggcaccatgaaccgtgggggcgcttactacctggctgcccggcatgcattcgaccaaaccgccgtgctgcgcctgggtgggcaagagggcctgcacggcagcgtgctgtggctcaagtccgacaaccgcgtccaggccgaaaccgaactggccgccggcaccctggattacaccgcgcaaccgggcacgcttgggctgacctgggtgcatggcctcgacgtgaacgatcgatgggccagcgactttcagcgccagcgcaagggcatgaatatctacagcctgcgcgcagagggcgatgcgggcgtcaagaacctcagcctggcgtttgaatacgcctggcaggacaaggacgccgggccggagaaagcctggtacggcgaagcgggctacacctttgccgataccgcctgggcacccaaggtgacctatcgctatacgcgttactcgcaaaactgggatgcgctgttcaccggcttgagcatgggctatggcacctggttccagggcgaagtggccggtaactacgccgggccgttcaacagcaatacgcgtatccatcacgtcgggctgaaggcaaccccactggaaaacctgaccctgggcgcgctgtatttcgattacgacaccgtgcgtaaaagcacggcgttgaacctcgatgcccgcgagctggatgtgtacgccgagtgggtggtcaacccgcacttgatcatcaccccgctggtggggctctacaaacccaagcaggactcgaccaccggtggcaaccaggtcggcggcaacggcaccaacctgtacagccaattgacggtggccgtgccgttctgaagggcgcgggctagggcgcgataccgctcggcgcgttatgcatgttttcggcaatgcgccgggtggtgtccatcaccatttcaatcacggtttcctggcgcagcagcttgaagctttgggtgctgccgacggccgacaggctgccgaccacttcgtcgaggtccgtctggatgatcggtgcggcgataccggtcaggcccaggttgagttcgtcgtgggtcaggcagtaaccgtccttgcggatctttttcgcggccttgctgaaaccggcccagtcatagggactgtcggggtcgctggccatgtgttcgtcgaacaggcgttgcaggcggcgacctttctgataggcgatcaaaaccttcgattgtgccccgcgaaagaacggcaacggctgcccacgcccgaacgcgaagtgataggtgtcggcgggttcggcgatgtaggtgttgatgatgcgcccgtcgtaaaacacgctggcgaacaccgccaggccggtttgcgcggacagctcgtgcatcagctcgcgcccggcgagcaggatcgggtcgtactggcgcattttccagtccagctcgatcacccgcgggcccaggccatagctgccggcatccacgcgggtcaacaggccggcatcgcacaggtccttgacgtagcggtacacggtggcccgtgacaggcccatgcgctcggcgatggtgtcggggtcgatcttcaacgtctgtgggccgaacaggtccaggacgctcagcaatttgctcaggctgctcatttcgttcctaaaaggggggcacgtgctgcattccgtgggcgcaacactaccgcagtgaaagaaaaacgcaatcttttgtgctttttagatcatcaaaaaatcacataaatctcattaaatgagacaaatcaaaataaaatgcttgttgattggatttttgtgtgtgataaatctcatcactgcaaacgctcaagcaagagggctgaaaatgaatggtgcgcaactgatagtgaatgcggcagcggcaagcggtatcgagtactgcttcgccaaccccgggaccaccgagattcccctggtggcggccatggccagcgcacccgctctcaagccggtgttgtcgctgttcgaaggggtctgcaccggcgcggccgatggctatggccggattgccggcaaaccggccatgaccctgacccacttggggcctgggttcgccaacggcatcgccaacctgcacaacgcacgccgtgccaacacccccatcgtcaacgtgatcggcgaccacgcctcctggcacgtcaactacgacccgccgctggccagtgacatccaggccctggccggcgcggtttccggctgggtgcgcacctcgcgcaccgcgtcgggggttggcgaagacctgcaggaagccatgcgcgcggcctggcaggccaaagggcagatcgccagtttgatcctgcccatggacctgcaagcccacgccgtgacccacaacggtgtgttcgccccgatccgcccgccggtgcgccgctttgccggtgaccgcatcgagagcgtggccagggccctgcgtgacggcctgcgcctggtgtttatcgtcggtgacgaaggcttgtcggtggccggcctggaagcggcggggcgcctggcgcaactgccgggcgtgcgtctgttcgccgagacctttccacgcctcagctaccgtggcggtggcctgccggacctggaccgcctgccgtacttcccggaagtggcgattgaaatcctcgaacaatacgacctggtggtgtgcgccggcgtgccggagcccatcagctacttcggctacgaaggcatcccgtcgcgcctggccgaacgtgagcgcctgctggcgttggccgatgtcggtgacgatgtcgccggcgcgctgacggcattggccgacgccctcgatgcgccggcctatataccgacgccccagggtatcgaactgccgcccggccatgccgagctgaccccacagtcggtgggccaggtgctggccgcctccctgccggacgacagcattgtctccgtggagggcggcacctgcggctatccgttcttcaccgcttcggcccgcgccgcacggcatcgggtactgaccaataccggcggcgcgattggccagggtatcccggtcggcttcggcgccgccctggccgagcgcggcaaccgtgtgtactgcctgcaatcggacggcagcgcccaatacaccattcaaaccctgtggagcattgcccgcgagcaattgccggtggtgatcctgattgccgccaaccaccgctacgcgattctgcagaacgagttgcgccgcttcggcatgaccgaactgggccctgaagccctgaagctgacggtgctcgacagcccgcgcatcgactggaaagccctggccaaaggctacggcgtaccggccagcacggtgcacaccaatgccgaactgcaacgggcgctggccaatgcgaatgccgacggcgggccttgcctgatcgaaatggcgctgtgaaggagtcgaccatgaagctgtttgaagtgttacccgccgtccaggcctttctgtcccagccgggtcgcctgtttatcggtggcagttggcaggacgccgccgatggccgccgcttcgcggtggaaaacccggccaccgaagaaaccctgaccgaagtggcccagggcggtgcgcgggatgtggacgcggccgttgccgctgcgcgctcggcgttcaacggcgcctggtcgttgcagtcaccggcccagcgcggcctgttgctgttccgcctggcggacctgttggaccagcaccgcgaagaactggcgcagctgatcaccctggagaacggcaagccgattgccgcagcgcgcggtgaagcggccagcgccgcgaccatcctgcgttactttgccggctggccgaccaagatcgaaggcagcaccttgccggtgtcaccggccagcggcgcgccgatgctcaactacaccctgcgtgaaccggtgggggtctgcgcgctgatcgtgccgtggaatttcccgctgaacatgtgcgtgtggaagctcggcccggcactggccaccggttgcgtggcagtgctcaagccggccgaacaaacgccgctggtcgcgatccgcctggtgcagttgatcgaggcggcggggttcccggccggcgtggtcaacctggtcactggcctgggcgccgaaaccggcgcgccgctggcggagcatcccgatgtggacaagatcgcctttaccggctcgacccaggtcggccggctgatcgcgcaagcggccacgcgcaacatgaaaaaggtctcgctggaactgggcggcaagtcgccgaacatcatcctgcccgacgccgatatcgtgcgcgccgccaaaggcgccgccgatggcattttctataaccagggccaggtgtgcacggccgcttcgcggttgtacgtgcacgccagcgtgctggatcaggtccttgaggaactcgaacggcacgccgccgcccacgtcctcggcaatggcctggacccggccagcagcatgggcccgctggtgtccgggcgccaactggcgacggtcaagggctacctgcaacgcggccaggaagaaggcgccgaactgatctgcggtggcgggcgtccggaacacctggagcgcggccactttattgcgcccagcgtgttcctggatcgcgccgaggcggcctgcgtggcccgcgaagaaatcttcggcccggtactgacggtgatgagctggaccgaaatcgacgacctggtcttgcgcgccaacgattcgccctacggcctcgcggccggcctgtggacccgcgacctgcgctcggcgcaccgcgtggcggcgcagctcaaggcaggctcggtgtgggtcaactgctggaacgtggtcgatgcggcctcgccattcggcggctacaagcaatccggctggggccgggaaatgggtaagaacgtgatcgatgcctacaccgagaccaaaagcgtgtttgtcgatctggcctgaactgaataatcacacgaggtaattgttatggatcttgaattgaaaggccgcgtggccattgtcaccggtggcggcatggggatcggcaaggaagtcgcacgttttctctccgaagaaggctgcaaggtggtgatctgcgcgcgccgcatggcgttcctgcaactggccgccgaagagatcagcgcccagaccggcaacgaagtgctgccgctgttctgcgacaccaatgacatgtccgccgtgtcggaaatggtcgaagccgcctacaagcacttcggccgcatcgacatcctggtcaacggtgccgctgcgccgtccggcgtcgtgcgcaacgacatcgagcacgctggcgacgatgagctgctgtcggacctcaacaccaaggtgatcggctacttccgttgcgccaaggccgtgaccccgcacatgaaggccgctggcttcggtcgcatcatcaacatcggtggcctcaccggacgcagcagcaaggtgctgtcgggcatgcgcaacctggccatcgcgcacatgaccaagaccttgtccgaccagctcggcccgtcgggcatcacggtcaacctgattcaccctggcgtggtggataccccgcatatccaggagctgtatgaccgtgaagcggtcaagcaaggcaagaccgcggaacaggtcgagcaggcctacatcgacgcgacgccgattcgccgcaccctggcaccgattgaaatgggctggttgattggtttcctggcgtcgcccaaggccggcgcggtgaccggcgagtccatcggcatcgacggcggtttgacccgtggtatctatatctgaggagtatctgtgatgagtaacggaacccttttggttgccaccgtcgggcaagcggtgatccgcagtgccgacgatggccgtacctggcatcgcctgggcctggggcaggacctggaattcgatgcaatcactcgctcactgagcctgcaccccgacgcgcccgaggtgatttacgccggtaccgacgtgggcttgtgcgtcagccgcgacaccggcggccattggcagcgcgtcgattcgccgttcaacgggcagaccgtgtggaaagtcgcggtggacccacgcaacgcacaacggattttcgtcggcaccggggcaccgtcccgcgccgtgttgtggcgcaccctggacggtgggctgagctgggatcgcgcaccggtggagattccggagttctgcgacggcgtcagtcgcccacgcctgctggcgtttgcctacgacccggtcgaccccgaccagttgtggttcggccttgaagagggtgggttgttccactcccgcgacggcggcgacagctggacccgcgtcgatgaccgcctgttgtgggagttcaactcggacgtgcacaacatcctggtgctgcccaaccatggccagaaagtcatcgtggtggtctgcgtcaacgcggtctaccgcagcctggacgaaggcctgacctggaccggcatcatcggccgcgaagccttcggcctgtattacatccgcgccatgaacgcgccgttgggcacgcaaagcgacctttacctgagcatttccgatggcacgccgggcaccaccagcaagatcctggtgtcccgcgatgcggcgctcagctgggaagtgctgccgctttcccagcagcccaattcctgtgtgtgggcgattgccttcaacccggccaacccacggcagatcgtggcgggcaccaagtacgggcacctgttcacctccgacaacggcggtgacggctggcagaaacagtggcgcgacttcagcgagatcgctgacgtgctgtggacgccggctgtggcgcagatcaaggccgggcatcaatccatcgtcaagaagcactgaggtatatcgccatgaaagtcgagatcctgcgtactcacctatcgctctgggtcgctgacccggacgtgtcggcccgctggtacgccgacatcctgggcatgcacgaaagtgcccggggcgagagctgggtcatgatggcgtttggcggcaagcaccacgacattgccttgatccgcgccgaccccggcgcccatcagggcgggctggggctgcaacactacggcctggaaatcgacggggacatgaccaccctgcgccagctctacggcatgttgctgggcaagggcgtcgaggtggtgaagatcaccgatcacgaaatcggccatggcgtgtacttcaacgaccccgacggcaaccgcatggaattcttcctcgagaccgaacacgacgatgcgcgcggcaaggcccggttcaaggccgctggcgcgccgagccgacatttcaacctggacccactggacccactttgaggcaaaccccgatgaaaaccgctaattttgcgacctatcacatccgtaaatggtacagcttcgtcgaagaaaccctggccaacgaaaccggccagctggccgatggcgagccactgttcaaatatgcaattgccgccgtgatcgccaacccttatgccggtcgctacagcgagtcgctggccgaactggtcgacccttcgccgctgctgggcgaagaatttggccggcgcatccaggcactggccggtgcccatgagattgtcagctatggcaaggcgatcctggtgggcagcgagggcgaatacgagcacgggaatgcattcctgaccaacccggccgccgatccgatccgtgttgcgctgggcggcggcaagtcctgggtaccgtccaccggcaagcgcggcgggccgggttcgaccatcgatgtaccgctggcgcacaaggatgccctgtatgtacgttcccattacgacagcatgtcgctgatgtttggcgacgggcctgcgcccgacgaggtcgtgatcatctgggcctttgccacccgtgggcgcttgcatgcacgcctgggtggcttgcaggctgaggacgtgaaagggctggatgggctgcactgaggcgcatggctttggcgacgccggattaaaaccacaacaagaagcggtgaatagcgatgaagcaggagaagacccaggttgtcattgtcggcggcgggcccaacgggatcacggccgcacactatatggggatgtacggaatcgactgcgtcgtccttgaactggctgattgcatcctgccttacccgcgtgcggtgggcatggatgatgaagccctgcgcgtgttgcagggtatcggcatcgccgagctggccgtgcgcgatatgatctgcgacgtgccgttgcgctactacaacgcacgcggtgtgtgtttcgccgaggtcaagccgagcaccgcctactacggctggccgatgcgcaatatcttcatgcagcagttgcttgaaggcaccctgcgcgaaaacctggggcagcgtacctgtgtggagttgcgccagggccatgaaatgctcgaactggagcaggacggcgagggtgtgaccctgcaggtgcgcaatgcccagggcgaggtctatgagctgcgcgccgactatgtgatcggcgccgatggcgggcgctccaccgtacgcaaaaaggtcggcgttgaattgctggggctgacccatccgcgcaaatgggtggtggtcgacaccgccaatgacaccctggatgcaccctataccgcactgcatgccgacccgcagcgcccgttcgtgtgcatctacctgccttaccagcagcggcgttgggagttcatgctgatggaaggcgaagatgaggcgaagatgtgcgaagaaagcaccatccgtgacctgatccgtgggcatatcggcgacgccgtcgaccagttgaacatcatccgcatccgcgcctacacccaccactcccgggtagcggcacgctttgtccaagggcgtgtggcgctggtgggggatgccgcacatatctcgccaccctgggccgggcagggcctcaattcaggtttgcgcgacgtggccaacgtggtctggaaactcgcggcaatcatccaggggcgtgcgtcccatgggattctcgcaagctacgaccaggagcgccgtgggcatgccaccgagctggtggccctggccgacaatatgggcaccgtattgggcttgaccaacccgttgatggccggcgtgcgcgactggttgttccaggcagtgaacagcgtcgacaacctgcgctcgcacctgctggagttcaagttcaaacccaaggccaccatcgccaaaggcctggtctatcacgaacgtgccgaactgcgtgaggacgacctggtcggccagctgtttgtgcagccctatatcgaagacgccaagggtcagcgtcggcgcctggatgacgtgttggggcattcctatgcggtgctgggttaccgggtcaacccgcgcgagcaactcagtgaaaagatggcgacattctgggcgcgctgggacacacgcttcatccaggtcaatcgttcgcgcagcggcttgggccgtcaccagccgttgacggcgatggacgccatcagcgtggaggacgtggataatcgcctcggcgaatggttctccaaggtgcgcgattgcatcgtcgtggtgcgcccggaccggtttgtcgcggccattaccacgcccgagcggctggaaagtgtgttgcgcaagttggcggagcaactgtcatgagcgctgacaaccccgtgttgaaccagttgcaccacgccacgcgcacggtgcaggccatcgcgccgctggcatctgacgcgctggacctgcactcagggtacgcgctgcaacgccaggcgctggacctgcgcctggcggcgggcgaacatctgagcggctggaagatcgccttcgccggcagcgccgcgcaaaggcgtttcggcctggaggagcccgtgtatggcggcctgactgaccgcatgcgtgtgctgccgaacacggcagtggcgctttcgcggttgatccagcccaagctggagatcgaagtggcaatcgtgctgggccgcagcctcgcaccgggtgactaccgtgatgaggagatcctggcggccattgcagaggtggcgccggcgttcgagattgccgattgccgttggcagggctggacgttcggggcgggggcttttcttgccgataacgcggcggcggggctgtattgcctcgggccgttgatggctttcgatcccattgcgcatgccaacgtcgcctatcgcctggaaagtgctggcgcgcttcgcggcgaaggcaacaccgagggccgggaggatccaccactggccaacctgtgctggctgattcgccgtctgttggctgacggccaaccggtggaggccgggcaagtggtgctgtccggtgcgctcttggcgccgatggatatccagcccgctacgtaccgcttgcatatgtttggcacggaactggctttgcttttcacggcggacaccgctcctgtgtgaacgccagctgccgtcatggatgacttgagtccccttcaggccgataacaacaacggggcacctaggaacgacgaccatgcttgctgaagttcgaaccttcaatgaccctcaattgcacgccggttccatccagggctggcggcaggtctatgaccagttgggccgtggctgcctgaccagcgagctatggcaattgtccgccgaccgctttcagatcttccaggaagtgttggacaaacgcgtggtgcagcgcggctatgcgcccaaagaccggctgtgcgcggccatgtcattgggcagtgcgcctgtggtgcagggtcagcaagtgggggcgcacagcgtcgtgctgttgcgcgatggcgaggagtttgtactgcatgcgcctgaaggtacgcacttcttcgccctcaacgtcgatacggtacgcttcgccaaactggccgccttcgagttgtccggcgatcagctcaagcgcctcaccacccgctcccaactctgtgtggatgacgcgttactgttgcgcatacgccagcggatctacccgctgtttcgtcaccttttgcaacaaaccgatgcgatcagcgcaaccgccgagaaaatgcttgaggacgaactgctcaacgcgttcctcgatttgttcagcaacgccaccgacgaggtgcgttgccgtcgcggcaattttgccgtgagtgcttacctggtcaagcgttgccaggagttgatcgatgccagtggcgataccccactgagtattctcgatctgtgtgaacacctgcgcgtcagccggcggaccctgcagaacagcttccaggcggtgaccggcatgcgtccggtggagtacctgcgaaacctgcgtctgaatgcggtgcgtcgacgcctgatcgccaccccggcctgcacccagaacgtcggcgaggtggcggtggcgatgggcttcttccacctgagccactttgcagcgcattaccgggcgctgtttggcgagtcgccgtctgaaacacgtcgagcgatggtctgagtctccggggttcaggcgacggggttgcccataccctccacaggtaagccttcctccagacagttgtccgggcgctcatgcaatcgctggttgcaccacgcgaagcctggcaccaccaccctgcacagcgccagtggcacaagacacgccaggccgacccgcggcctgatcgccacgtgggtacgtgtctctcgaagaaatcaacgagctttgatggaggaaccctggagacccggggtttatctgtgtagctcgcgatcaggcgtagctgatcctgtcggtgtaggcgttttgcagcattttgcgttggtagtcgcagggtgtggtactgaccagttttttgaagtcgcgcaggaagtgggattgatcggaaaagcccaggtccagggccagctgcgaaaacgaaacatcctgctgggtattgagggtgtccagggccgcctggcagcggatgatccggcaaaacgtcttgggtgacatgccggtgtcctgattgaactggcggtgcaaggtacggctggtatagccactgagatcttcgagttgctggatgcgaatatcgccgcgatggcgcagcgcctgctgaatgatcatggcggtgagtcccgatgtcttgcccatcaggcgtggggccaggtagtcgttgaacagccgcatctggtcgcccagcagcggtgcctggacgatgctttcgaagatgcgatgggcgaaccccgagacctccagcaggtcgagttcccgctcggtcagctcttcggccagcacattgatgaagccgggaatgacacccggtgaaaagcgcacgccgaagtagtgatggtgctgatgcaaatggacggcttgggcggtcagcggtgtgccacagatcctggcgctgggtcgagtggcatcgcagtcgaaaacgatgtccacgcagccatccggcacggccagcaggtcgctcgattgggcgacgtcgaaggcatagaaatgcgagatcgccgggtgcgcggagggcatcaccgaatagcgtgaagaattgagcacgaaccaaggctgttcgttcgcggtgtggtgccggggagtcggcacattcggtttgatcatggttgcaccttgggtaggcagcgctgcgggaaaaatcacgcattaatcgcgccaactgacgctgcgccggcctgagggcatgtccgaaatttacaataccgtcgacaacgtccgcccgatactcgacctcgacagcgtggagctgcgcctaccgcagcgatgtcaccttcagcgcgagaataactatgtctacaaatacaaaaatcgacttcatctacctctccgagcaggacatgatccgcgcgggggtgaccgacatgctggcctgcgtgaataccatggaagagatgttcggcctgctgtacgccggtgactaccgcatggccggcccgaacaacgactcccatggggcgatggtggtttttccgcaggattcgccgttcccgaatatgcccaagcccacggctgatcgacgcatgatggccatgccggcctacctgggcggcagcttttgcaccgccggcgtgaagtggtacggctccaatatcgccaaccgcgaaaagggcctgccgcgctccatcctgatgttcaccctgaatgaccccgacactggcgcgccgttggcgcatatgtcggccaacctgctgtctgcctaccgcaccggtgcgattcccggtgtaggcgcgcgccacctggcccgcaaagactcgaaagtcgtcggtctgcttggccccggtgtcatgggcaagaccacgctggcggcatttatcgcggtgtgtccgcacatcgacacactgaagatcaagggccgtggccagaagagcctcgacaattttatcgcgtgggtcacagcgacttatccgcagatcaccacgattgaggtggtcgacacccttgaggcagtcgtccgcgattcggaccttgttacttattgtagctccggtgaggtgggcgacccctcgatctacccaattgtgcgacgtgaatgggtcaagccaggcgccttcctcgcgatgccggcgtcctgctcgctcgacgcgggtatggaacagcccgacgtgcgcaaggtgctggacaacactggtctctaccaggcctggtttgaagagttacccaagcctgcgcatcacaccgtgcccgtcattggcgtgcgcttcatggacatgattgccgaaggcaagatgcagctcgatgacgtcgaggacatcggcaagatcatcgccggtgccgcgccagggcgtagaagcgatgatgaaatcatcatcatgtcggtgggcggtatgcccgtggaggacgtggcctggggcacggtgatttaccgcaacgcgatcaagcaaggcatcggtgtgaccttgaacctgtgggaaaccccggaactgcgctgagccaccccaacactttcctttgcgaggcattcgacatgacaaaaatcatcaagctcaagaccggttcgccgtttgaagatcaggccagctattcgcgcctggtggtcgtggataactggatctacgtgtccaacacggcgggccgcaacccgcagaccaagctgattccggaagacgtccttgagcagacgcaccaggtcttcgccaatatcgagtcggccctcaaggccgtcgatgcgagcctggccgatgtggtgtgttcgcgggtgttcatccaggaccccaaggacgtgcccgcggtcatgggcctgatcggcgaaaagtttcgcggcgtcgacccggcgagcaccgtcacctgtccacccctgggctcgacggtctacaaggtggagctggaagtgaccgcgtatcgcaacgcgtcgaaggcgcaggtcgaagtcattcgcctgtcgcaatgatcgtcaagcggccaggcgcaggcgtggccgcccttattcgcttaccgagtcttgaccatggcaccgacaatagcgcccgtgacaacctccaccgtatttcccagcgccacgtccgtcgtcatcattggtggcgggatcatcggcctgacggctgcgctgaccctggctgagcgcaacatcgcggtggtggtcctggaaaaaggccgtatcgccgccgagcagtcatcacgcaacctgggctgggtacgcaagaccagccgccacgccgccgacatcccgctggcgcttgcggctgaccggctgtgggcacaaatgcccgagcgggtcggggcggatgtcgggtatcgccaggaaggcattatgtttctgggccgcacacctgcgcagatggcgatgcacgaggggtggctcaagtcggtggagcatttgtcgctggattcgcggctgctcagcaagcgtgagattgacgcgatggtgccaggcggcgtgggtgattgggccggcggcatcttcaccgcgtccgacgcgcgtgccgaaccgacgctggccagcagtgcgattgccaaggcggccatggccatgggcgtggtgattatcgagcaatgcgcggtgcgcacgctgcagatgtctgccggcgcagtcagtggcgtggtcacggaaaaaggcgaaatcagctgcgaccatgtgttgctggcgggggggatgtggtcacggcgttttctgggcaacctcggtgtgtcattgccgaccttgcccttgacctgctcggtgctgcgcacccaccccatggaggggccgacgcagatcgctgtcggtgcgcctgatttttcctttcgcaagcacaaggacggcggtttcatcattacccagcgcggtaagttggacgccttcctgaccctcgatcacttgttgctcgccaagcaatatatgccgcagttccgtgcgcaacgcagcgtcttgaacgtgtcgctgggcaagccatttatcaatgacctggcactggctcggcggtggggcgccgatagcgtcagcccgttcgagcgtgtcagggtgcaggatccagccgccaacccgcggctcaataacgacgcgatgaacaacctcatggcggcctggcctgtgtttgagcaggcgcggatcgcccaggcctgggctggcactatcgacgtgacacccgattccaacccggtcatcggcccggtcgcgcagattccggggctgaccgtggccaccggcttctcggggcatggcttcggcacgtcgccagcggcgggccatctcgcggcggacctggtcagtgggcatacgccgatcattgacccaagcccttatcgcttcgatcgtttctaaaggagcatgcccatgcctgccgacagctgttttttcactaaccgtgccggcctgcgcctgcacttcttgcgctggggcgattcgagcggcgtgcccctggtgctgttgcacggcttgcgggcctatgcacagacctgggagtcgctggtgcaagccttgggcgcgggctactgcatttacgctctggatcagcgtggccgggggttgagtgactgggctgcgcccgccagctaccacactcaatcgtatgtcgaagacctcgaagatttggtcgcccacgtgggcctgcagcgatttgtgttgctcgggcactcattgggcggcgccaacgcccttgaatatgcgcggcaacacccgggccgtttgctcggtttgctgattgaagacatcggccccggctcttcaagccagggcgatggcgccgcgcgtattcgtcgcgagatgggccagacaccgttgcagttcgagagctgggaggtggcccgcgcattctggcaggctgcgcgtccgggcttgtcgcaagagggcctggcatcgaggctcgcgcattcgatgcaagagcgcgacggcgcgatcacctggcgtcacgatcagcaggggattgccgaggcgcgcctgagcatcgaaccgacggatttgtggccggcggtgcgcgcactggattgcccgagcctgttcattcgcggcgcacgctcggatttcctgccgcctgcgacactgcacgcaatgactgcctgcaatccgcaggtgcgcacggtggaggtcgccgacgccagtcactatgtgcacgacgatcaaggggcggtgttcaatgccctggtggcggagtttcttgaaagccttgcgcgcccggaatgaagcccacagcccgcatgattgcgttattggcctcgctgacggcctttgtgccgttttccattgatacctacttgcccagcctgccgcagattgccgttgagctgtcgagcagcacggcgcgagtgcaacacacgatcagcgcgttcctcgccggcttatgcctgggcatgttgttctacggcccgctgtcggaccgctatggacgtcgcgcgttattgttgggcagcctcacgctgtatggcctggcaactttggggtgcctgtttgccgcaagcatcgatcaactgatcgcctggcgctttatccaggcgctgggcggggccggcgcaatggtgctggccaggaccgtggccagggatttgttcggtctggcgcaggccgccaaagtgttgtcctggatgcaaatgctgacaatgatggcgacgttggttgcgcccatggtcggcacctggctggtgctggtcgacggttggcgcaccatattcgccgtgttgttcatcctgtgcgggttttgtctgctgatggtcggtgtggggttggacgaaagcctgccgccgctggcgcgcggccactcgctcaaggccgcctttgcggcctacccgggtattctccgccagcctcgggcggtcgcgttgatcctgtgcatgtccctcacgtttggcggcgtgttcgcctttatcaccgcctcaccctttgtgtacgtggagtacttcggtgtctcgccgcgcctgttcagtgcgctgtttggcctgaacattctgggcatcatcgtcgtgagctttatcaatgcccgctgggtcacgcgcctggggccactgcgcatgctgggcgtaggaaccgcgctggcaggcatcgccgcaatagcgttgttggtggcgggttacacccaatggggcgggctgaccagcatcgtactgtgcctgatgctgtacatgggggtgacgggcttgctgggggccaactgcacggcgagcctgatgagcatgttcccgaggcaagcgggggcgagcgtcgccctcggggtctcgatgcagtttgcctgtggggcgctggcgagtctgtgggtcagtcgcctggcggatggcaccccatggcccatgtgcctggtggtgggctgttgcgggctgggctgcctggtggcgtatgccattgcgcggcgcgcgccgttcacgcctgtggttgtgcgggatgaacagcctgtgccgtttcaaccctgaggcggcgacaagcacgcggagactgctggtaatttgcttgagcttgccagccacttggagatgcctgacagcacagggtgaatcctcgcgctaaggctctcccagattattgaacaccgtttccagcatgcggttgaggcgctggatctgggcttcggtcatgccactgaaactgcgcttgaacacgtcgccggtggcggcctggatgcgttcgatggcggcccggccctcggccgtgatgcgtacctgggtaacccgtccatcgtcctcgcagggcgcggtgtcgaccaggccatcgtccttcatgcggtacaccgttttggtgatggtcgacagcttggcgatggcgtgggtggagatctcggaaatactggattggccgttttccttgaggatgaacagcacgcgccagcgggggatatccaggccgatttttttcagggatttttccatgtattggctatagcggccatgcaccatcgccagccagtagaacggaaaatcttctttgtgaaagtcttcactgccggggtcgtagcgactggcgtgtgttttcggagacgtcatggtcagctcatgtcggaagaggcaagcaatcatagacttttctcgtgaattcggcacggttatcaccggctgaaacgcaagccatgacgtcggggcacgtgaatggatttaattgacaattcacgtaatagtcagggagtgtgaaaaaagacagccggcgtttcaggcttcgttcactgagttttacagcgaaggaaaacgtgacatgaccatcgtgattgaacagctttctcttggcggcaacgggtttagcgtgatggtgaaagacaccatcgatgtcgccggcagggtgactcgggcgtcgagtcaggcgcttgatgacgcggcacccgccgacacccatgccgatgtggtgcaggccctgttggacaagggctgtcacttggtgggcaagaccagtctgcatgaactggcgttcggcaccaccggtatcaaccattggacgggtacggcgccgaacccgcgttttcctgggcgtatccctggggggtcttccagcggttcggcagcggccgtggccgctgggttggcggactttaccctcggcaccgataccggtggttcggtgcgtgtcccggcgtgttgttgtggggtgttcggcttcaaaccgacgttcggccgtgtcagccgtcgaggcgtgatgcctgcgcaaagcagtctcgattgtgtcgggccatttgcggccagcctgccgatgctgatcaaggccatgcaggtcattgaccccaccttccatccggtgcctctgcagcagccaccacggctcggcatcctggcggtccaggcaagtgctgcggtgcaacgtgtgatcgatgccgccgtggcagacagtggtttgccgactcaacccgtgaccctgccgagcctcgatgcggcctatgctgccggcatggtggtcatcaatcgtgaaacgttcgacgcctgtgggcacttgttggcgaccggtctggtgggggccgatatcgccagtcgcctggccgctgccggcaccaccacggcacagggcctggtgcatgccgaagaggtgcgcgaacagttcacggccgaagtcgacgcggcgttgcgtcaagtcgacgtactggcgttgccgaccatgccggatttcccgttgaggctcgccgatgccgccgacacgcaagccgtcctgggcatgacccggttggtgcggcccttcaatctgagcgggcacccggcgttgagcattcccctgggcagcgccgagggcctgccggttgggttgcaactggtgggggtgaaaggcgcggacgaacaactgctggctatcgccggccacctgctcgaatgcctgtattccaaccataagggctgatcggctcaggaggtgaacatgcatgaaccacacgctttggcaacgcttgaaagacgcttgcgccggttcgaaacccaagacagcgtgcgtgcctgcatgaaccgctacatggtgttgtgtgacgggttggatgcgcactcgccgttgccagagttggccggcctgttcacccaggacgcggtgtgggagggcaagggcgccaaatacgccaagagtttcggcggctatcgcgggcgtgaggccattgccgcgatgttctcgggctacatgaagtcacccgcgcactttgccctcaatgtgcattttctgaccagtgagctgatcgaggtgcacgatgatcacgtcatgggcagttgggtgatgttgcagacgtcgacatttgccagtggcgcctcccacctcaatgccgctcggctgacggtacggtttgccttggaggagggcgtgtggcgcatggcgcacttccagaccgaaaacctgttcgggcgccctgtgcaggcctggaacagcgaagacgacctgccggtgccccaggctggcgtcgaatgatcgccttgcatcgctgacaccgctcacgtccttttgtcattacccgcccccggtctgccgggggcgtggcgttgccgtgcgcgcagtttatggttggtctattaattttgtgaaaaaaaatattttttccaaagacttctggtttctttatggagagatcagatgctaacaagtccttatataacaataatttgaaaaattaattgagtgtcatttttggaatttaaggcgttttaagcaaaaatattgcgtgaatattcaattgactcttcacgtaaatccgcgcagatttatggcaacggcacccacaaaaataaaggtaaccctatgccgatctatcccgtttgccttgcttgcgtagcgccccttcgcgtcgaaggcacatccgccgcgcccagactccccctccgagatgcccggtttttccggcactgaatcctgcccaagcccataccgttcctgacgacggagtaactatatgcatgcgctaattgcctcagcgaccggggtcgcgagttcgcttgtcggaggtgccgatttcgaggtgttgcttgacgacattcgtgagcgtgcccgatccggtgagttcgaccgccagcggcacatctcacgggacgtgatcgagtccttcaagcagcacggcgtgtaccgggccctggtgcccaaacgctttggcgggctggaatgctcacccgccgaattctgccgggtcatcgaacgtatctcccaggccgatgggtccgccggttgggtcgcgagcttcggcatgagcccggtctacctcgcggcgttacccctcgagagcattgcccaggtgtacgccgatggccctgacctggtctttgccggcggtatcttcccgccgcagccggccgaagtggttgccggtggcttcatggtcaacggtcgctggaagtactccagtgggtcgctgggggcagatattgtcggcgtcggtatcgcacccaaagacggcgataccttcggtttgccgcgtattgccgtgatgccgcgcagcgccattcgcatcgaagaaacctgggataccgtcggcctgttgggaacgggcagtcatgacctggtggccgagcatgtgcgggtcgccgaagagtggaccttcgtgcgcggtggcctgcccaatctcgatgagccgttttttcgttacccgtcactgtcattcgccacccaagtgctctcggtggtcggcctgggtgttgcccgcgccgccctggatgcattgacggacatggcctgcggccgcgtatcggtcaccggcgcgccggcgattgccgatcggccactggctcaagtcgatatcgcccgggcggaagccgacctgcgggcagcccgtgcattcttctacgaatccatcgagcgcgcctgggagtacgtgctggcgggcgatgcagtgccggtggcagccaccaatctgctgcgcctgtcttccacccacgccacacgcgtggccgccgatgttgcccgtaccgcgcaaatgctctcgggcatgagtggtgtgttcaacgacagcccgttggcccgctgcgtcaacgatgcccaggtcgtgacccagcacgccttcatgggcgacatcacctatcagaacgccggagccatgttcttcggtaaacaacccttgcctggctacctctaaccgtcgagaccctgaaaatgaacgataaaaaaatgctccgcgtgctgttctgcatggggatcaaccagaatttcttcgatgcgcctcgtgacgagcaattgcaggtctgggcagccttcagcgcgatgtggaacggcattcacgacctggcgggcgtgcaggtgctcggcaatatggacgacgaccagagcatggtcggcccctccgacggttttccctggaccacttacctgctggccgatgtgccggacatcgataccgtacatgccgcctgcaacctgttccgtagcacgccggtcggcgatggcccgtacaaattgtggcgctacaccaaagtcgaagcccgggttgggcgcgagctgatcatccagcgcacttgatgccgaggaggccatcccatgaacaagctgattcctgccgtgaaccttgccgtcgatcctgccgacctggtgcagtccgatcgcgtgcacacctcgatgtacaccgatgcccagttgttcgacgccgagcttgaaaagattttctacagcacctggatctgggtcgcccatgaaagcgagatccccgacagcggtagctataaaaccacctacatcggcaagcagccggtgattgtggtgcgtgatcgcaagaaagacacccatgtgctgctcaatcgctgccgtcatcgtggcgccaccgtgtgtgaacacaaaaaaggcaagaccaacagtttcgtctgcccgtatcacggttgggggtatgcattggacggctcgctgcgcggcatcccgcatccggaaagctacgccgattgcatcgacaaggccgagctgccgctggtcagcctgcgtaccgaaagctacgccggtatgatcttcgccaccttcaaggatgacatccagccgctggaagactacctcggcgcggcgaagaaatggatggacctgttcatgaagcagggcgcgggatacgggatcaaggtccccggcgaacatcgcttccgttttccgggcaactggaagatccagctggaaaacaccaccgacgcctatcacttcccgctggtgcacaagagcttcctgtcgtcggtggacgagcagaccctggcgttgttcgacttcgtcaaaggccctggttatgtcgaggacttgggcaacgggcacagtgtgatggtgatgattccggacctgatcgacctggaagccgacctggacaatcccatccccgagcgctttgaagcactggccgcggagctgcgtgatgaaggcatcgaggagctgcaggtgcgccgcattgtgcgtgcggtgggcggcaccggtttcaacctcaatctgtttccgaacgtggcctgttcgatggcgtttttccgggtgttgcaaccgctctcggtgaccgagaccgagattcaccactcggtcatcaccatggacggcggcccggccgccgccaaccgctaccgcctgcgcctgcatgagcactttcaaggaccgatggggtttggcacgccggacgattccgaagcctgggagcgtgtgcagaagggcgcaagcgccggcgatgagctgtggatcatgctcaaccgcggcctgcccggcgagcgtgccagtgccgacggccgggtgtccgacgtaagtgccgaaacgggcatgcgcgcggcgtaccaacagtggaaaaagatgatgtcggcctgagccgtggagaaccttatgaatctgcaagtgctgcaagaagtcaccgccttcatctggcaggagggcgacatgctcgaccatggcgagtacgccgcctggttgaagatgtgggcgcccaagggcacctacatcatcccgatcaacccgacggaaaccgacttcgagaacacgctcaactatgcgtacgacgaccaccatatgcgtgagttgcgggtaaaacgcctgatcggtggcgagtcgatctccaccagcccgcagccgcgtacggtgcgcacgcaatcgcgctttcgggtgctgagtgacgacggggtgaacgtgacggtgcgctgcgcacagaacgtgcgtgagttccgcaaggagagcctgaaactctacagcgccgacctgacctacgagttggtgcgggctggaggtggctttgagattcaccgcaaagtggtgagccttatcaacagtgacgatgccctcgccggtatcggctacatcctttgaggcgcgccgacatgaaccagatcgcattggtgactggggcaggccagggcctgggccagcgtttttgcgccagcctgctgcgggccggctattcggtggtcattaccgatatcgagcaggcggccgcagaggcttgccaggcgcaattggaccccggtggcgcgcgcagcctggccctgcccttggacgccggccgcaaggatgacttcgagcgtgccctggccagtgtgctggaacgcttcggtgcgctgcatgtggtggtcaacaacgctgcggtgaccaagaccacgccgttgatgcaaatcagccccgaggagtttgacgccgtggtgggcctgaacctgcgcagcgtattcctggggtgccaggtgctgggcggacacatggctgacgccggttacggacgactcatcaacatggcgtccctggcagggcagaacggcggcaccgcgacgggcgcgcattacgccgccagcaagggcgcgatcatcacgctgaccaaggtattcgccaaagagtttgcctcgcgcggggtgacagtcaacgccatcgcgcctggccccatcgactccgccgccgtgcatgcggctgtgccgcctgagcgcctgccgggcctgctggcaaatatcccggtgcagcgtctgggcgatgcggattttctgggtgacctgatcgtgcagttggcgcggcccgaagcctatttcaccaccggggccacctgggacgtgaatggcggcctgttcatgcgctgactattaccgggtcgccacggcgaccttcacgaactccatggaatcatggccatgactgaacaactgttggatgtagtcgtgcacaagcgcgagctgcaaggggacggcgttgtcgtcctggatttgacccgtcgtgacggtgcaccgctgccgttgttcgaagccggtgcacatgtcgacattcacataaagccgggcctggtgcgccagtactcgctgtgcagcgaccccgccgatcagagcgtctatcggctgggcgtgctcaaggacccagcctctcgcggcgggtcgctcggtgtgcacgatacgttgcaggaaggttgcgagttgcagatcagcgcaccacgcaatctgtttccgctggccggcgatgcgcggcgctcgatcctgctgggcggcggtatcggcatcacgccgatgattgccatggcttacacgctgcaggcatccggtcacgccttcgaactgcattactgcgggcgtgagcgcggccgcagtgcgtttttggcagagctggcggattcgccgtttgccgccaaggtgttcacccatttcgatgatgaagggcttgaacagcggctggacctggcccacgtgttggggtcgggcgaggccggggtgcacctctacacctgcgggcccgctggcttcatggagtgggtgatgcaaggtgcgcgtgagcagggttataccgaggagcacatccacaaggagtatttccaggtagaggtggacagttccggcgccagctttgaagtggtggccgcgcgtagcggcaagaccgtccaggtggcagaagggcaaagcatcctcgccgcactggcgcaagtggggatcaagatcgagatttcctgcgagcagggcgtgtgtggaacctgcctgtgcgatgtgcttgaaggtgagccggaccatcgcgacgtctacctcacggatgacgagaaagccggcaatgaccaaatcctggtgtgttgctctcgcgccaaatcaaaaagactcgtgctggatatctaaggggaacgacatggtagacgtaagcagttttcgtaatgcaatggccatgctcggcggcgccgtgacggtcatcaccaccgatggcgtggcgggtcggtttgggttcaccgcgtcagcggtgtgcagcgtgaccgactcaccgcccacgctgttggtatgcatgaaccgatcgtcccattccaacgagcacttcaagcgcaatggcgcggtgtgcgtcaacattctgtgtggtgatcatcaagaaatgtccggggcattcgcgaaccgtgcgttgacgatggatgaacgctttgccgtgacacagtggaccaccctggaaagcggcgcgccggtgatgaccgatgcgctggtcaatttcgactgccgtattgcccaggtccatgaagtcggatcccacagcattttctactgtgaggtccagaccatccgtcagggaaatgccgacgaggggctggtgtatttcaaccgtgcttatcaccgcctgggcgaggcgtccaaagcctgctgagcccggcccgttgcgccggctgccgatagcgtgccggtgtgtggcgatatgagcacattgtgtttttcaaggtatgcggcgtgtttctagaatgtcgccttagttgtttcgtgaaagcgctgaagtgcttccgtgccgtcggtcgccagtgcaagaacgggcagggttagagcaaaggcgatcattaaatgcgagggcagtttcatactgtttacccacgttgcgcgcacaacaaggcgctaaattaaattcagttgaaatgtaggtcagggctgattcgggaatatagggtatcggtacgggaatcaaccgttgtcataggttgtactcgcactttttgacctgtgttcagccgatgttcagcgttgttaagcttgaataaacaagttgcacggcctttacaactcttcacttttccaatctggatcgcctgaaaagcaaagtgctagtctgcgcttttttagagacggcagggacgcatgaataagctaacggaagtggctgtaaaaaagccctgttcatttatttttgtcgttgcgtttattgtattggctgtcctgcaatacaagcccgccgtgctcaattacaccacgcgctttgtcgactttgcccaatacatgcttgcgcacggcgtcacgctgtttccaatcgctgaagatctgcagccttatcccgattacaccgtgatcaatacactcctggtgtatctggtgtccctgccgtttggccgtgtgtccattctgtcgatgggcgtgcctttttgcgtcgctgccgccctgatgttggtgttcatatacaagttgggtgcgttgcatgagaagaaatggggcgcctacgcggtggtgtttgcactgttcacctggtcatttctagacggcgtgaactccctggcgctggatgtgtacccggcacttttcacggtgatgtgcttttacctggcctacgcgggcgaggtgcataaacagcgttatcggttgctgctggtgctcgccggcctggcactgggctttgcgtttcgtggcccgatcggcctgatcggacctgccagtgtggttgcctcttattacctgttgagccggcagtggcgcatgctggtggtgttctcgttgttggctggcgtggtcctggccacgggtatcgcgctgctgacttgggcggcctacgtgcagggcggcgatgcttttctgcaagaggtgttgatcatgcaaggactggggcggttcggcagtgatcacgcgccccgttattacttctacttttcggcaggcttgctgacctacggtgtcaccgcaatcattgcggtgagtgtgatcatcaagcagggcaaacactttttcgaccgaacgccgcatcccgtcacgagcatgctcctgtacctcaccggttggctcctagtgatcattgtgctgttcacgattccaagttcaaaaaaggcgcgttacatactgtcgatcaccccggctatttcgttgttggcggcctacgtcttcgtggatcgcagtgaagtgtttgcaaacacccggagaaaactgcttgggttctgcttggagttgccgctgataggcctcgtgatgctgttacttgcctatgggtacagcttgtatgcggtgaccccgctgcagcccaactacctcggcgcctgcctgggtttgattacgcttgtggccgtgcggccctggttggaatcacgctttcacgagcatccccatcgtgagttcgtcgtcttttctttcggggctgtcacctttctcatactggatatgtttttcttcaactccgttacttaccatctggagttggcccatgagccgacgcctaaattcctgccttattggttctggtgaacagtgagtctgcaaaaaaaacacgcggtgtttgcaggtgcaggcatctgcgcgatgctgctgggattggcggtgttcgtcctgcaaaacctgtccgatatggagttgacggacgctcgggtttcgacgctgacgtttcgctctggcgacgcacagttggtcgggacgctggtcttgccattgcatgtccaggcgccgcccgtggcgctgatcattcatggggatggtcccatggaccgcttcgcagcccacggctacttcccgctgatcaacagtttgctcgacgctggaatcggcgtgtttacctgggacaaacaggggatcggcgagagcacaggccattggctcagccagtcgatggcggaccgtgccacggaagcggtggccgcgctcgcccaggtgcgcaagcaggagggggttgcaccggacaaggtcgggtttctgggtttttcccaaggcggctgggtcattccgcgtgccgccagtggaggcgacccaggcttttcagtgattatcggcggggccgtgagctggcgccggcaaggcatgtactacacgcaggtacgattggccgaggaaggccgttcccaggatgagatcgacgccatcgtcaaagagcaatacgagaggaacgacaaggttttcggcacagcgaatcaagcctacagcccccacctgtttcccggtatggaccgcgctcatttcaacttcgtccagaaaaactacaacgaagacgttactgccgcagtgaaaaccatgaagggcccggtgctggcggtctggggcgaccaggacctgaatgtcaatacggccgaggactcaagcgtctaccggaagatgtttgctggcacccggggtaggcacgttgtggtcatccccaacgccacccacagtttgttgagggccggcctgttcaatgatcaattggtatcgcaatggccggcatggaaagagtacgcgttcatggcactggggcgtcacgcctatgtgccgggttccctggaactgataagtcgctgggtcaagtcctcaacgtcggggaagtgaatcgctctgcgctttaaacatcggcaaccgcttgagcatccacgtcaacagttcctgggcgggcgccgccaatggtcttgaggccttcaccaacagcttggcctccacccccagcaacagcggatggtcgatcagcaccgacgccagctcgccgttttcaatttcccggtaggccgcgaactccccggccagcgaggcaaagccgccagtcgcgaccaggcgcttgagtgccgccagggagttgctgaccagggtcgggcgtacttcgatcttctcggcgtactccagcagggtgatggcatggccgataccaaacgtggtcggcgtcagcaccaatgggcattccaatacctcggtcaccgtcgccatggtgcctcgcaccgccagcggatggtccgggcgcaccagcaacatcaccggctgcagcgaggcggcgcggtagtcgatgtgtggatggggcggcgggttgtaggccaggccgatatgcgcgcggttttcggcaacttcgttgagcacatcgtccaccggcaggatgtccagggtgatttcaagcctggggtattgcttgctgaaaggcgcgagcacgttgtcgaccagcgcatccacataaccttcgctgatcaccacccgcacatggccttgttgcaggcccttgatcgcttgcaattggtcttcgagtttttcctggtgcgagcgatagccgcgccagaactccagcagatgcgccgccgcctcggtgggctgaacgccacgggcctggcgctcgaacagcttggcgcccagttcttcttccaacagcttgatctggcgggtgatcaccgagggcgaggtgttgatgctgtctgccgcccccctgatcgaaccgtgcaccagcacttcgtggaagtagcgaagacgttgttgattgatctcacgcatgaaggatgatccgccttggaagttgtgttgtctacaaagcaacgctaagtgaacttagttgctcttgctgccgatggtgggccggcgcaccctgaattggcaagcacgcagacccacaaaaacaattggagactcgtatgccaacctcccgggcgccggcagaacattcagccatttctgccctctaccacaagctcaactggcggctgctgccgctgttgttcatcggctatgtctttgcgtacctggaccgcatcaacgtggggtttgccaagctgcagatgcaaagtgacctgggcttgtccgatgccgcctacggcgccggcgcggggattttcttcattggctatgtgctgttcgaactgcccagcaccctgatgctgccccgcatcggggcgcgtaaaaccttcagccgaatccttgtgctgtggggtatcacctcggcgtgcatgttgttcgtgcgcgatgtaccgacgttctatgcgatgcgttttttgctcggcgtgttcgaggccgggtttgccccaggcatgatctattacctgtcgcgctggtacggcccgaaccgcatggcgcgggcgattgccattgtgtttatcgccggccccatgggcggcattctgggcggacccttgtcggcctggctgatcaccacgcttgccggtgtcggcggtctggccggctggcaatggatgtttttgattgaaggcttgccctgtgtattgctcggcgtgctcatgtactgcgtgctgtccgaccggcccgccgatgcgccttggctgaatgaggcggaaaagcaactgttggaaaccgaactgggcacggcgaatgcgcgcagccattcattccgtgcggtactgcgcgaccctaagctgtatgtcctggcctcggcatacttctgcatcatcttctcgatctacgccatgagtttctggctgccggcgatcatcaagaccctgggcctgcaagacacccagcaagtgggctggtatgccgccatgccctatgtcggggcggcactgggcatgtactggatcgggcgccgctcggaccgcctgggcgagcgccggctgcactgtgccgtcccggcggccatcggcgcgcttttgctgatgctctaccccttggcgggtggccacctggtggggtcgatgaccttactgacgctgtcgatcagcatgatgttcatggcctacaccgtgttgtgggcgatgccctccgagcacatcaagggcgatgcggccgcaggcggcattgccttgatcaacaccatcgggctgtccggtggtttctggggcccggccatgatcggctgggccaaaaccgccaccggcagcttgaacacgggggtcgtagccgtgggctgcgtgttcctgtgcgcggcgttcgtgatcattgcgaccaaaccgcgaacgcgcaccggcgcggcgggcgagtacagcgcgggttgagtggcccgccatcattgaaaaccatgaggaacccaagatgcttctatacctgtcgacatgggccgagatcggccactttctcgagcgcagccgcaccatcgtcatccccatcggctccaacgaacagcacgggccgaccgggctgctcggcaccgactggatgtgccccgagatcattgcgtgccaggcgcaaaaaaacgccgatatcctgatcgcgccgaccttcaacatcggcatggcccagcaccatatcggcttccccggtacgatctcattgcggccctcgacgttcattgccgcgatcagcgattgggtgcattcgctggcagcccatggttttgaaaagatcctgtttctcaatggccatggcggcaacgtcgcctccattgaagcggcgttttccgagctgtatgccgaagccagctttgcccgtcgccctgcggggttcgccctgaagttatgcaactggtgggacctcgacggggtgggcgaactggccaaggagcagttccccaccggccacggtatccatgccacgccgtccgaaatcgccgtgacccaatgggcctacccggactcgatcaaaaccgccgattactcaccccagatcgcgccgtgggggccgattcgcgaagccttcgacttccgcgcccgccacatcgatgggcgcatgggctcggacccggcgcaggcctccccggagaaagggcgagacctggtgatgatggcggcacagggcctgatacgcgaagtcgaggcgttcaacggcgagccgatcccgggctaagagccagccctttcaaggcctttaggtagaacaggcggtaataccctgtggcgagcgggcttgtcccgcgttgggctgcgaagcagccctgaaacccccggccgaagagtgcctgattcaccgcattcctccatctagggtcgcttcgcaacccaacgcgggacaagcccgctcgccacagttgcagtgtccgcccttattggtatggtatcagccagattgggtcggtttttcaaagaccttgaaagggctggggctaagagcactttcacgccaatccgggcgctgagccgtcaacgctcatgtttagcgcgtggtggtgccaggaagccccagtgcgctcagcttttcacgtacgtgaatcagcttttcctggttcgtacggatgaacgctgagcgctcatcaacggcggctacgatcttttcaaacgtcttgagctgtggcgcaaagaagtcgagcagtttttcgtcatcgccgatcaggtcgtagatgtccttgaaggaactcttgatgaccgtggtaatggactctttggcggttttgagttcctgttcgagttcgtgagccttgtaggcactcaggaggtctgaggtcagggtgaaggctgcaccggcaggaccggcccatttggaaatggccccggcgattttggttgcctgccacggcttgaatttgatgacgacgccggttaccgagcccagcacatcgcgcgcggcaaacactgcacccttgatgatgtccgggctcaggttggcgatgcctttcgccgcgccgcccatggacttgagtgcgccttcgctcatggcattgaggaagctctcacttgagtcgagctgacgcccgatgtcctgggaaatgcggctggtgaccttggacgattgatcgaacgaccggtcgatggcgctcttgatcctcaggttgagcttatagccgacaccttcttcggtgtagccgatttcgtcctcgagaaagtcacggatgttctccagtgacaaagggcggagcttgcccagcaattcgttttcgatatttcgcagctcctcgaacaactccccggcaagacgtttgacgtcgcggcggcccttggaaatgtcctgtttgatccgttcggactcctcggcgttctgttgtgcgaacgcatccagtctgcccaattgctcttcagcctgggccacatgctggccgacgacatcgcggaccacgtccatgccggtcttggccatcaggaccgcgggtacgttgtcctgcagaatgcgagtggtcatggctttcaggtcgttgatccgcgagcggctttcataatgctcgggtttgctgaaccagaattccaggccgcggccaccggggttagaggccaggcagacgatattcaaacgtgccagttcttccgaggtcaggttagcggcccgctgcagcttggctttcaagttgtcttttttgatggcggcttgatcgtcgaacagcgcctgttcggtcaagtcagtcacttcatccattttattgatgacgaagaccgtcgaagacagtttgttcaagtcgcgcagtacccacttggcgatagcactgtggctatccttgagcggattggtggcgtccacgacgtacaagatcagatgcgcttcggagatgtaacgcttggtcaggtcttcataaaccacctgttggccatcgacagtcttttccttgtcgccaaagaggcctggggtatcgacgatctcgcatttgccgggcaggccttctggcgtgtaaatcgccaggcgatcggaggactcgtccatgtcgatcttcatgtcggccatgattttacccagccatgcagcgatcacgctggtcttgccgtcggagaaggcgcccagcagcgcaatacgtagaacgtcggactcgatcgcgttgacagcggaatcaatcttttccatttcggcattaacgtcggcgcctagctcgcccagctctttcaggatgaaccgaagctgatccagtcctttgatcgctgcctgtttatcaacattaaattgcgtgaattgttccatggggcattttctccagttgatctttagtgcgctgcatcagggccatctgctgcttgatgatgtgcagcgggcgaatcagggatgcatggatgtcgctgacttgtccgaggaccttctcttcgatttggctgcgaatcggtgcgagcaactccttgagttcatcacgcagggagtccacagccttggcgcgtgcctctgcgatcttttcctggacttgagcctgggctttgcggatgcgtttttcctcgctgagaaggaaattcatgaggttgatcaaaaagcccactgcggcgccgacggccgcgccaatcaggttgccgacaacaggaaacgcggtgccgatacctgctcctgcaagggcataagaaccaacgttgaacagcatccagccatagtctttaagatccaggccaaggcccagttcgggtgtcttgtagctggcattgaggtcttctgctacataagccacggcctgctcgaattcaacccgcgaaacatcctcgagcaagcgctgcatggcctgcacaaggtcaccctggagctctgccaggtacttttcgaactgggtctgcaagtcgtctttcagttgctcctgacgctcgcggaaggcgcgctggatcttggtggaaatcaaatcgttgttgccaaaatgttcctcaacgatgttgtcggcgcgggcactcaaatcgatgaagagtccgttccacaggttttttcggccatcctgcaaaaggcgttcgaacctgaccagcccatctttgatagccgcgcggcattttttgaattccggctctgtccgggcgatgaacatttcgtgctgcgtgtggagcgcttgcaggatggcgaggttttccaccagcaattcatgcactttggtcttgttgctttcgatcatgtcttctttgaacgtgcccagttttccgtgaagcacgcgggcgactgatttgatctggctgaactcatacatggctttcgacgaggcgaaatacttgcggtaattgcgctggtgaatgaccaggtcccgatcccgggacgggtggatgctcgtgcgttcggtccctggtgcaatggccagggatgaaaaggcgagcaagccctgcacgcaatgtccgggctgcatggccttggcgcccagcgcggactcaagtacaccgatggtttgctgcaatgcctttgtcgagtcgccatcgctttccagagacgcaggaacgccgtcgaattcgaattggtcagcgttaccgcgcacgttcaccaggggacacacttgggtgccgaggcgcaaataggcgcgaatcttctctgcagtggctttctcaggcttcttgttggtgccattgacgtagaacaccaggtgcgctttggctactgcttcgcggaccatatgagcgtactttccttcgtcaccctcaatgccgggcacatcgatcaactgaaagcgtttgcccttgtagttgagggtgtagaacgtattgcccttggtgaagtcctcttcgcctgtaccaatgatgcgaccgtctgtgcgcgaggccagcgcctttttccggctaaggaccaaggtcccggaatacacgctggccagccgctggttcaacacctcatccagggtggccgaggcggtcttgatgtgagtgaaggggcttgcgatggtcccctcattcgacagggtggtcgcttcatcgaacagttcgtcgagctcgaaattgctcatttcacgctcctgccagtttcaagagcgctgccgatgccgcagcccccagaaccagtccgccgcaggtaaaaacaatcaacttcgtcctgattctggcgttggattgttcatgggccagttgcagtcgttgcgccgcctcttcctgctgggccttcagctgttgggcggctattgcctgttcggcttcaagctgttgcgcggcggctgcttgctcattctttaatcgggcattggcctcttgctgcgcgagggcggttcgggccatggcctcggactcagcgatgcggtttctggacagggcctcttcctgcaaaatctcggaaagatgacgcgtcccctggcggatttcagtgatttgcgctgcatactccgcgtaaaccgcattcagcccttcgcgcaatccatcgatgtgttcagccagcgcctgttcatacttcaccaagtcgtgggcgttatgttccagcagcgcttgccgggactcttctttgaacagaatgcgcaatgattcgatgatcgtgctcttgcccgcattggtttcgccgaaaaacgccagggtgaacacgtcccactcggcatgggttttcaactggtcgagttcaccatcgaaacgaacctggatggcgcgaagcttctcggtcatgttgccaacttcgcgcttgccctctttgtgctcgacattcagttccagaatatcggccatggcgctggcgatactgtctgaaacgtcggagtacaggcggttaaggtcttggggcgcgttcattacagttccttgtgtgctggcgtctaagggatgaaggtgtaacgtcaggaggtgatgtgccgagtgtcacgcgagcccacggtgggaggggtgctgctcgttggtctggcacatgggtgaatcgcaggcagccgccatggccggttcagtccagcggcaatgaaacggtattaggcgtataggaggagtgcgtcgcgagatcggctcaaaaacagccgtggaataagttgcctgaggcattcacaacatccttgttggtgtgggacttcatgcttgcaaagcatgctccatagcactacatcggccctgcggatgaaagctttagtaggacagcctaaattgaaaccttgcgcgggacgcaaggcgacctttagtgtttgccatcaatcccatttttggaccaggcaaggaagtcagcatgacgcaattggcggctcagacagtctcatcggcgtgcgcagcattggttgaactggatacgcttcaaatacgatcctccgctggcaacctgagcccggctcaacacgcgtttgctgactatctggcgaacctctggtcaggtgctccaggtgctttcgagcatcgttatccgatcaccaggagtcgggtgtggaagccatggcggcaacaccctcagcgccagagcaacgactggtggtgtttgtccctggccgaggcagccaggcactactcctggccggaaaaaaaagcacctgatgacttcgccagtattgcagcgcgatttcgcaaggcgctcgttgagaaccagtgcgttgatgcgcgcgcggcctgcctggaaatattcaaatggggaggcgttggcaataggcccggtaatgcgtccgtgcggtgggtgcagacgcaggctgccgagaggactctgtgctgctctatccttcgtgcgatcgcactgcttggccctacgaacaaccagtcactggcggttttcgacggcacgaaactgctgatgaattccgcgatgaccaagatctacgctgctgcggctcctgagggcatcatcatctacgatggccgggtgggggccgcgctggggttgttggtgcgaaaatggctggatgggacagaggaatgtaaggttccgcaggatcttgcttttcgctggggccccaggcagaaaacggccaataacacagtcgaaacacgtgacccttcgcgagggagcttcacatttgacgatctttacaaaaaaagccgcgcagggcagccacatcaatccgaggtgtgggccgagcttgtgcgaaccacaagccgcatcctgtgtgaggtgattcggatactcaaggtacaggggcaggatacgacgctcctcagtctcgagcgtgcattgttcatggtgggttttgatgtgcgtcaatcgtcaaggctactcaaatagccgaacagattcgccgcctccggtgacagccgcgccggatccgccacgccgacatataaggtccgcgccacccattccccctccagcggtatcgcccgcagtttcgcttgcagcagttcgggatgcaccgaccccaacggcaggataccaatccccaatcccgcctcgatcatccggcagatcccatcaaagctgctgacctggatacgcaccttcaagcgcttgccggtgccggcggcggcatcgttgatgcgccgcagcagcgagctgccctggttcaaggcgacgtagtcaaagtcgagggtatcggccagggacacgcttgagcactgcgccagcgcatgcgtctgcggcaccagcaccaccaggcggtcgcgtcggtaggggcgcacgtgcaagccgggtgcgggcacgttgtcggcaaaaatgccgatctcggcctcgccgttttccacggcgtgaatcgtacggtcgctcagggcttcttccagttcgatacgcacgtgggggttggccgccagaaaggccgccaagtctgccggcaggaactggatcaccgccgaggtattggcaaacagccgcacatggccacgtacacccttggcgtaatcgtcggcgtcatgggccatctgctgggcgacgtcgagcattgtgcgcgcatgctcggccaggcctcgaccggccggcgtgagttgcaagccgcgggggacgcggttgaacagggtgcaatgggtcacccgttcgagttcggccaggcgcttgctcgcggcggaaacggtcatgtgcgcgccgttggccgcctgggtgaggttttgcgtgttggcggccagcaccagcaggcgcagcgacaccaggtccagttgcagcaggttgatcatatttacgccctgggtttccaatctggaaagagtagtggaaatctttgaaattctcacgacctgtctttggcgcgattatccgggcatcgcctccaacaacaacggacaacgtcatgagcctacccctggaaggcatcaaggtggtcgaaatgggccaactgattgccggacccttcgccgccaagatcctcgccgagttcggcgccgaagtgatcaagatcgaaccgccaatcaccggtgaccccctgcgcaaatggcgcctgctgcacgacggcacgtcggtgtggtgggccgcccagtcgcgcaacaagcaatcggtcaccctcgacctgcgccagggcgaagcccgtgaagtggtcatgcggctggtcaaggacgccgacatcctgatcgagaacttccgccccggcacccttgaaaaatggggcctgggctgggatgcactgtcggcgatcaaccccggcctggtcatgctgcgggtctccggctacggccagaccgggccgtatcgcgacctgccgggctttggggtgatcggcgaggccatgggcggtttgcgccatctttccggcgagccggggcgtacgccggtgcgcgtcggggtgtcgatcggcgactcgctgtccgccttgcacggggtgatcggtgtgctgcttgccctgcgccatcgcgagcagcagcacggcgccggccagcaggtggatgtggccttgtacgagtcggtgttcaacctgatggaaagcctgattcctgaatattcggtgttcggcacggtgcgcgaaccggccggcagcagcttgcccggcatcgcgccgaccaacgcctaccgttgcaaggatggaaagtatgcgttgatcgccggcaatggcgacagcatctaccgacgcttgatggagaagatcgaacgcctggacctggccgacgacccggaactggcgcaaaacgatggccgcgtacgccatgtggcccgcatcgacgcggcgatttccacctggacggccgagcgcaacctcgatgcggtactcgccgcgctgaaggacgccaacatcccctccggcaagatctacgacgccgccgacattgccgccgacccccattaccaggcgcgcgacatgctgctcgccagccagctggacgacggcaccgccgtcaccttgcccggcattgtccccaagctgaccgccacacctggccgcgtgcagtcgcgcgcgccgagcctggggcagcacaccgatgcggtgctcgacggcatcggtatcgacgcaccgacccgcgccgcctggcgcgctcgcggcctgatctgaaccaaggagcccttcaatgaaacgcctgtacctgcaggaagtcgccacccgtgacggcttccagaacgaaaagagctttatcgacaccgagcagaaaatcgccctgatcgatgcgctgagccagtgcggctacgccaaaatcgaagtgacctcgttcacctcgcccaaggccatccccgccttgcgcgatgccgaggcggtgatggccgggatccagcgccaaagcggcgtggaatacacggtgctggtgcccaacgtgcgtggtgccgaacgggcgctgggctgtggcatcgacgaggccaatctggtgatgtcggtgagcgagccgcacaaccgttccaacctgcgcatgacccgcgaacagtcgttcgcccagctcagggaagtggtgggggtgatcgggcgtgggccggtggcggtcaatgtgtcgctgtccacggtgtttggttgcccgatgcagggggatgtgccggtcgacgaggtgctggcgtggatcgggcggttcgccgagctgggtgtgcgcggcgtcacgctgtgcgacaccaccgggatggcctatccgacgcaggtggagaatttgtcacggcaggtgcgcgagcgctttcccgagctgcaactgaccctgcatttccataacacccggggcatggcgctggccaatacgttgggggcgttgcaggccgggatcgaccgcttcgacgcgtcgcttggcggcctcggcggctgcccttatgcccccggcgcgagcggcaatgtgtgcatggaagacctggtgcacatgctccacctgatgggctatgacaccggcctgcacctggaccgcgtactggcggcgtccgcccgcttgccggggctgatcggccatgccacccccggccagatcctaaaggccggcaagcgcctggacctgcatcccattcctgcacacgtgcacagcctcagccaacaggtagcccaccatgattgatcatctcgaccacctggtcctcaccacgattgaccttgccgcctgcacagacttctacacccgcgtcatgggcctgcgcctggagacctttggcaatggccgcatcgctttccgtttcggcaaccagaaaatcaatgtgcacgagcgcgggcatgagttcgagcccaaggcccacctgccggtgccgggcgcgctggacctgtgctttatcgccagtgtctcgctggacgcggtggtcagccatttgaacacccaggcctggccgatcatcgagggcccggtgctgcgtaccggtgcgaccgggccgattcgctcggtgtatgtgcgtgacccggacctgaacctcatcgaaatctccgagcaggtgcctgcatgaatatcgtgtttctcgacggcgcgagcctgccgtcagcgttgccgcgcccggctcaagccagcgcctggaccgcgcgcgaaaccacccgccccgagcaagtgcttgaagccctggccgacgccgacgtggcgatcaccaacaaggtgcgcatcgaccgtgcgaccctggcgcaattgccgcgcttgcaactgatctgcgtggcggccaccggctacgactgcgtggacatcgccgcctgccgcgatcagggcgtgacggtgtgcaacgtgccggcgtacagcgcggtcagtgtggccgaatcggttattggcgccttgtttgcgctgcgccgccacctgctggcgtaccgcgcggcgtcggccagccagtggccgcagtcgtcgcatttttgcgtgcacggcgcgccgatccaggacctgcaaggctcgaccctgggcatcgtcgggcgcggtgatatcggcagccgcgtggcgcgcctggccaaggccctcgacatcaccgtgctgttcgccgaacaccgtggcgcgccgcaggtgagggcgggctacaccgccttcaacgaggtgttggccaggtccgatgcgctgaccttgcattgcccgctcacgccccacacgcgctacctgatcggcgccgccgagatcgcccggatgaagcccggcgcgttgctgatcaacaccgcacgcggtgcgctggtggatgaaaacgccgtgctcgatgggctcgccagtggtcaattgggcggcgcggcgctggatgtgctgcacgtggagccgccgcaggccgaccactcgttgctgcattgcgagcatcccaatctgctggtcacgccccacgtcgcctgggccagccaaagcagcgtcgcacgcctcaaggccgtgctggccgccaacatcgaggcattcgcggcacaccgaccgaccaacgtggtgacctgaacgccccagcgacttccttcctgaaacctataggcagagccatgacaaaaataatcagctcgtccgtcgactccgtgaatcaggcgccggcacggcgcacaccgctgtaccagcacctgtatgtgcaagtgctggcggccattgtgctgggggggatcctcggccacttcagcccgggcctgggcgaacagatgaagcccttgggcgacaccttcatcaagctgatcaagatgctgatcgcgccgatcatcttctgcacggtggtcagcggtatcgccggcatgcaggacctcaagcgcatcggccgcatcggcttcaagtcgctggtctactttgaagtactgaccaccatcgccctggtggtcggcctgatcggcgtcaacctgttcaagccgggcgccggcatgcacatcgacccggccagcctcgacgttgcggccatcgccggctacaccaaggcggcccacgaccagagcgtggtcggcttcctcacccacatcgtgcccagcaccgtgttcggtgcgtttaccgacggcgacatcctccatgtgttgttcatctcggtgctgtttgcctttggcctgcaactgctgggcgacactggcaagccgttgctcaacaccatcgacctagtggccaaggcgttcttccggatgctcaagatcgtcatgtacctggcgccgctgggcgcgttcggcggcatggcgttcaccgtgggcaaatacggcgtacagtccctgggcgcctacgtgaacctgctgctgtgctactacgccaccgggctggtattcgtgttcgtggtgctcaacctggtggcgcggctggccggtttcagcctttggaagttcctcaagtacatccgtgaagaactggtgctggtgctgggtacgtcgtcctccgaatcggccttgccgcgcctgatgggcaagctggaaaagctcggctgcgagaagtccactgtcggcctggtggtgccgtccggttactgcttcaacctcgacggcagctgcatcaacatgacggtgctggcgatcttcattgcccaggcgctggacattgacgtgtcgctgtatcaccaggtgaccctgctgttgattctgctgctgacttccaaaggcgcggcgagcgtgacgggtggtgcgtttattaccctggccgccacccttggctcgatcgatgtgatcccggcggcgggcctggtgctgttgttgggcgtgtaccggtttatctcggagggtggcgcgctgatcaacgtgatcggcaacggcgttgccacgctgttcattgcgcgctgggatggggcgttggatcgcgagcagctcaagcgtgaattggggtagggcgcaggctgggaaatgtacgccgctgtacactcgctgtgcaccacgcagcgtggggtgtagagtggccggcaattcccaggcaaaggtgacccccggatggcgcaatcggcaaaaccgcgaggcaagaaccaggacacgggctggcgaggctcggtcgatgtgtggctggacgccgcctacgcggcgttgaaagagtcgggcatcgacgccgtgcgcgtgatgccgctggccaagcagttgggcttgtcgcgtaccagtttctattggttcttcgaggaccgcgagcaactgctcgccgccttgctggcccgttggcgcgacaagaacaccggcaacctggtgcaccagtgcgagcgttacgccgaaagcatttgcgaggcgattctcaacgtctttgaatgctggctgaaccctgagctgttcgactcgcagttcgaatttgccgtgcgcagttgggcgatgcagtcggcggaggtctcggcggaaatcgcgctggccgatgacacccgtatcaacgccctgaccggcatgttccggcgctttggctacgatgacgaggccgccgatgtgcgcgcgcggaccatctacctcacgcagatcggctacatctcgatgaacaccagcgaggacgtggtggtgcgcttccggcgtattccccagtacgtcagcgtgttcaccggcaagcccttgaagcggcgcgaactggaccgcttcttcggggcgtttggctacgccgagaccgcaccgggggagtttgagctgctttagaggtccttgaccaaccgcaacgcgtcgtagatcgccgcatgggtgttgcgtgcggccaccgcatcgccgatgcggaacagttggaagcgaccctcggggttggtcaccaggtgctgcgcgttgccggcgatcaagtcatgctgctcgaccgcgccgccgttgctggaatgcccacgcaggtcgaagtacaggtcatccagcggcagggtgccgtggttgaccaccacctggtccaccacccgctgcttgtgcaccgcgccgtagtcactgccgaaagtgaccagcagccgaccgtcgcgttgctccaccatctcgacccgataggtcacggtaaaggttacgtccaggtcctgcaggctgcgcatgtagggcaccaggttcatggccatgacttccggcgcgaacgagcggtccggggtgacgatttcgacgctggcaccgctctgcgcaatcacctcggccgcttgcagggcggcgtggtcaccggcgtcgtcgaagatcagcacatggcgccccggcttgacgtcgccggaaatgatgtcccaggtcgacaccaccagctcattgccctgggccagcacctcggtatgcggcaggccgccggtcgccacgatcaccacatccggctccagcgccagcacggcctcggcctcggcccaggtgttgaagtggaacttgacacccaggcgttcgcactggctcatgcgccagtcgatgatgccgatcatttcgcggcgccgctcgctcagggcggtcaggcggatctgcccaccgggccggtccgccgcttccagcaccgtgacgtcatgcccgcgctcgccggcgacccgcgccgcttccagcccggcaggtcccgtgccgataatcagcactttgcgccgcaccgccgccttggggatgtgatggggcatgctggtttcgcgaccggtggcggggttgtggatgcaataggcggcaccgccctggtagatgcggtccaggcagtaattggcgccgacgcagggccgaatgtcttcttcacgccgttcgatgatcttgcgcacgatatgcgggtcggtcatatgggcgcgggtcatgccgaccatgtccaccttgcccgaggcgatggcgtagcgcgccgtggcaacgtcggggattttcgccgcatggaaggtggggaacccggtagacgcgcgaatctcgccggcaaaatccaggtgcggcgagttgcgcatgccctggatcgggatcacatcggtgaggcccgcgtccgtgtcgatatgcccgcgcaccacattgaggaagtccaccaggccgctgtccttgagcatgtgcgacacctgcaacccttcgcaggcgccgaacccgcccggcagcgcctcgtcgccggtgtagcgcacgccgagcaggaagtcttcaccgacccgctggcgaatgccgcgcaggatgtcgaaggtaaagcgcatgcggttttccagcgagccgccgtacgggccatccagatcgttggtgagcggcgaccagaactggtccatcaaatgcccgtaggcttgcagctccaggccatccaacccggcggcctgcatgcgctcggccgcgtcgacgtagtctttgatgattcgctcgatgtcccagtcttccagcttcttcgggaaggaacggtgcgaggcctcgcgccggtgtgaaggcgacaccactggcagccagtcggccttgtcccagcgtgtgcggcggcccaggtgtgtcagctggatcatcaccgccgcgccgtgttcgtggcactcgtccgtcagatccttcagccagccgaccacttcatccttgtacgccagcacgttgttgaacaccggcgggctgtcccgcgacaccgctgcggagcctgcggtcatggtcaaggccacaccggccttggcgcgttcgacgtggtaggcgcggtacagcgcctgcggcatgccgtccaccgggtaggccggttcgtgggccgtggtcatgatccggttgcgcagtgtcaggtgcttgatcttgtagggctgcagcaggggatcgctggacatcagagtgtgctccgtcgtgggcatcatcaggcttggcgatttgaaattagggtaaatgtacaggtgtgtcaataatgctcgacatgcatgtacattttaagtgcgacctgctgatgttctgcaaacgatgcaggcacgtgagagcacggtgggcaaggcggtggcggcgtattacgcggcgaacaaggcacggtccgaggggatgttcaggttgtggtttacgggctttttgtggtgagcggggcaagcccgctcaccacaaaaagccggcaagccacaacaacccgcaaaccacagcgtcaggcgtatgaactgccatgggctgctctcaacaaatcgcgcacggcatcggtgcgcagcagcagggtcatctgcgcctcgtcgatcacgatttccgcgatgatcaacgcgcagatcagcggcgcggtcacgaaccaatggcaccagcattgggttgccagcgaaacggctacgccgatgatccacagcgccaatacccacttgggcgcgcgctgttgcagcggcacccacaaccgctgcagccgtttcagccgggcagtgtgcagtttcaacgactcttcaaggagtgataaggacgaattcatttctcacgctcgctgagctatccgggcgtggctgggaaagggattgcccagccacgacaagttgatgcattcaacttcgatccagtgcccgtttccaggcagtgctgcacagcttttgaatgcaacgcacataccctcggtgtccaataggacaaagcatcgatagcaccgggttgttctgaacatcatggaaaagatgcgcatggtggggcctggtttacttaaagattccaactgagttcaaacagcgttccgccgttttccattttccggcacgtcaccgcaccgccgtgggcgagggcaatcgcgcgcaccaccgccaggcccaggccgctgccaccctgggcgcgggaccgcgagttttcgccgcgctggaaggcatcgaacaggtgcatggccaggtcctcatcgatcccggggccatcgtcgcgcaccctcaggtagtgcatgccatcgcgcgtgctcaggtgcacgttgacgttgccgggcgtggcgtgccgacgcacgttgtcgagcagggccagcagcgcctggcggattcgagcggggtcgcagcgcagggtgcggcgttgcaggtccagttgcagggtaaaaccggcggcgaccaggctcggttcgaacagccgcacatcctcttcaatgccggccgccaggtcggcgtcttgcacgttgagttcgaggtagccgctgtcgcccaggcccaccacccgcaggtcctcgatcatccgcgccaatccttcgacctgaccgagcaggctgtagaactgcgccgtgtccggttcgaatacgccctcggccaagccttgcaggcggccgcgcaggatggtcagcggcgtgcgcagttcatgggcaatcgccgcattccagaatgcctgctcctgggccatgcgcttcaggcgctgggccatgctgttgaagtcatccaccaggatcgccgcctcaccgatggactggtcaccggcgacggcttgcacgtcgaggtcgccatccgccagtttgcgcaggttttcggccaccgagttgagcggcatcaggatccgccgcgacagccgcgtggccacgaaggcacccaccgccaggctgacgcaggtggtcaaggccatccacgcccactcgacattggccggcagccaggcatcggcctgctcgtccgagagcggccagtaggtccataacagcgcataaaacacgtaggagccgatcacggccagggcgatcacgcagagcaccaccgccgacatggccgcaatgatctggcggctcaagccattgagcttcttcacacgccactcccgaaccggtagcccacgccgcgaatgctcgccggcacgccttgcagccccaggtcttcgatcttgcggcgcaacttgctgatatggctgtcgaccgtacgttccaggctgtcgctttccggtgagcacaacgccaacaattccgcgcggctgaacacgcgtttgggggccctagccaattgggcgagcagtttgaattcggtgacggtcagcagcagcggcaacaccttgccctcgatattcagcgtgacctgatggctttcgatatcgatttcaaacccgtccacccgcaacacattggcaccggcggcatatttgtagtcgatggagcgtcgcagcacggcctgggtacgcgccaccacctcggccgggttgaacggcttgacgatatagtcgtcggcaccgatgcgcagccccatcagcttgtccatgtcctggtcctgggcagtcagcatgatcaccggcgtattgccgcgatggcgcacttcggccaggaccttccagccatccacatgcggcatcagcacgtccagcagcatcaggtccggcttgagggtctggtgcagttcgagggcgcgccggccatcgagggcgtgcgcggtacgaaagccactgcgcttgagataggcgatcaggatgtcggcgatctcgggctcgtcttcggcgatcaggatcagcgcctgggcgtctcggacgctgttcggacggggcgtcgatgtaaaggggaaatcggtcatagtctgctcggtgaataaaccttgtcgtggttgccgctccatggccacgcttgcaagtgttgatcatagcttctgggtgagggcgcccaacatctggttggcggtggaaatcactttggagttcatctcataggcccgttgcgtggtgatcatgttgaccatctcttcaacggtgctcacgttggaggtctccagggaccgttgcagggtggtgccgaagccattgagccccggcgtaccgacctgtggcgcgccgctggaggcggtctccaggaacaggttgttgccgattgcctgcaagcccgcagggttgatgaagtcggcggtctgcaggttgccgatcacttgcgcagcggggttgccggccacggtgatcgacaccgtgccatcctggcccacggtgaaggtcttggcgttgtccggcaccacgacggccggttccagcgcaaagccactggccgtgaccacctggccattggcattcaggtgaaaggtgccgtcgcgggtatagccggtggtgccgtccggctgcagcacctggaaaaaaccgcgcccgttcaccgccaggtccagcggttgcccggtggtctgcaggctgccggcgctgaagtttttctgggtgccgacgatctgcacccccgtgcccagttgcaaccccgacggcaacgcactgttctgtgtcgactgcgcacccggctggcgcttgatctggtagagcaagtcctggaactcggcgcgatcacgtttgaacccggtggtcgagacgttcgccaggttgttggaaatcgtcgtcagctgcgtgtcctgggccgacaagccggtttttgcaacgtacagggctggaatcatgccgttctccgtgtgaacccggtcgaccgggcactctgatgaaacctattgtgcgcaacgaacgtgcgcattcaggggaggttttgtggaggaatgatggagagcggcattttttgttggccctgatcacttcaatccgggttcgatcaggccggcgacgccacgtccgatgacctccgggtagctgtgttcggcatccaggttggtcagcaccaccaccgtcaaccggtcgtcgaggtagcgcgcgatggacgaggtaaagccttgccaggagccgccgtgctcgaccacggggtggccgttgatcgtgcggatttcccagccgaacccgtagccttgcgcccgctgtttgccggcgtaggggtagggcgtccacatccgttgcagcgaggcgtgtgtcagcagggtttcatcgtagagggcgcggtcccagcgctccaggtcgcggacagtgaaatagagcgtaccgtcagccgtggcattgaaggtcggcgacacccattcctgattcctcagctcaccgtcgacccgctcgtagcccgccgcccggttgggcactatctcaaggtccgagatgacccgtgatgagcgcatgcccagcggtgtgaagatgcgctgctggagaaactcaccatagggctgcccgctgacacgctggatcaggatgccgagcagcacgaaattggtgttttcgtaggcccagttctgcccggccttgaagtccagcggcagcttggtgatcgccttggccagctgcgcttcgctgaagtcgcggcgtatatccaatgggccgccgggcttttgcagcgctggcgtgtcgtaggccgacaagccggacgtgtgggacaacagatgggcgaccgtgatcggcgcccaactcgccggtgcctcggggaagtacgtgcggatgctgtcgtccaggccgaccttgccttgctccaccagcatcatgaccgccgttgcggtaaaggatttacccaccgagccggattgcaacacgctgtcggcgctcatgggcacgttgagttccacattcgccaggccatagcccttggcgagcacggcctggccgtttcggtagatacccagggccaggcctggcaactgctgccgggttatttctgcgttgacatagcggtcgatggccgagcgctgttcgtccgtgagcggcgtggctatcgccaggggcgcggacatcagcaggacactcgccgcaagggttcggaacatgggcacctctgaagcgtttttgcggtttcaggaggtgccagtgtgcgcgaggggggtggatgtttgcgggaggtttgatggagggtgcatgtagtcgatagggccagcactcactgggggggggatgaatttcacctacctgttggatgtttatcgaacgtgtgggcaagtgatcatctcgacagagtggatttagcctttgatttggtcggttggcgtgcctagtactcgatgcaactctccagcgagtgcgatcaactgctgttccagcgcttcgacttcgcaaaggctgattccctccttgatgacttgcagggttttggcttttctcgtcggtgcgggtccgaggttatgcgcgtcttgggaaaccaacacttggcgcagtaggttgttgatcacggtttgataaccggtacctgcattttccgctcgctcgcgggcggctgcaatcaccgcatcatccagcatgatagtgattcgggttttgcctttgttgctggcgactgcaccgcgcttgccggagctgaagtcgtattcgtctttcatggttcaagcctccaagtactggcgccgttcatttttggatgcgcgcctggcactgataatccgtacaaaatttggatcgcggtaggtgtaggccactaccaatacgcgtccctttgcgtccgtacccatgattatccaacgctcttcgtcgtgatcattgtcttgtatggttagagcggtctcgtcgtaaaacaccggttctgcatcggcaaggctcacgcccttgtgcttttgctgattagtgatgctttttgctttgtcgtattgaatcctgaaagttctcattatgcatattttatatgtatataaaagcaattggacaaagcgacagtcagggcattggttcagcgtctgcgggtcccgatttgggtacgcacatccctacctatcagtgagggatcgattttgaggagggtgcccgcgtatgtccgtgcgtaaccggtgatccgttaagtagtcagattccgattccatagccagataaggtcttatgtcgatatcagaccaacccccgccgtttccaggctattttcgcgccggtcagcccgcgtaaggtgactcatcattcaaaaatgatgatcgcctgaccctccagtcagtcctcacgccgatcaccgagaacaacaaaaacaatgaatagcctccattccagcgactcgaacggccagttggcgcaaggcttcaagccgcgccatgtcaccatgctttccattgcggggattatcggcgcggggttgtttgtcgggtccgggcatgcgattgcggcggcggggccggcggtgctgctggcctatctgttttccggcctgctggtggtgctggtcatgcgcatgctgggggagatggcggtggccaacccggacaccggttcattctcgacctacgccgaccaggccatcggccgctgggccggcttcaccatcggctggctgtactggtggttctgggtgctggtgattcccatcgaggccctggccgccgggcatatcctcaaccagtggttcccgcagatcgacgcttggctgtttgccttgttgtcgatctttttgttggtggtcaccaacctgttcagtgtgtccaagtacggcgaattcgagttctggttcgccatggccaaggtgatcgcgatcatcgcttttatcggcgtgggcttcgcggtgctgatgggctgggtgccggagcgtgaggccagtgggcttggccagttgatgcaggaccatggcgggtttgcgcccaacgggctgtcggcggtggtcggcgcctttatcaccatcatgttcagttttatcggcaccgaagcggtcaccatcgcggcggccgagtccagtaacccggcgcagaacatcgcccgggctacgcgctcggtgatgtggcgcatcggggtgttctacctgttgtcgatcttcgtggtgatctccgtggtgccatgggatgacccgttgctggcctcggtcggctcttatcagcgtgcgttggagttgatgaacattccccacgccaagctgctggtggacgtggtggtgctgatcgccgtggccagttgcatgaactcttccatttacatcgcctcgcgcatgctgttttccctcggcaagcggggagatgcccccgcgctgatgaacaagacctcggcggcgagtgtgcccagggcggcggtgatcgccagcaccatcctgggcgcgggcgtgaccctgctcagttacttcatgccggccgggctgttccagttcctgctggccagctcgggggccatcgcgttgctggtgtacctggtgatcgcggtttcgcagttgcgcatgcgcaagatcctgcgccagcgcaaggtcacggtgagcttccagatgtggctgtttccgtggctgacctggctggtcatcgcgttcatttgcgcggccttgacggtgatgctggtcacgcccgaacatcgtttcgaagtctcttcgaccctcgtgctgtccctgataatttccttgatcggcttgctcacggcgcggcacccggaacccacgcaaaaaccagtggccgcagtttcgcaatcatgagtggccgcccggtcagcagtatcgttttcctgctgctggaccagttcaccctgatgtcgctggcggcggcggtggagccgttgcgcatggccaaccagctctcgggccaggagctttacacgtggcacacggctagcccggacggcaacccggtgtgggccagtgacggtgtgccgatcacgcctgacggttcgatcctcagtgtgccctccgccgacattgtgttggtgtgtggcggcatcggcattcagggcaccgtgaccggcgaactggtcaagtggctgcgcggccaggcgcgttacgccaagcgactggggggcatttgcacgggcagctttgtgttggcgcgggccggcttgctcgacggctatgaatgcagcgtgcattgggagtggttggcggcgatgcaggaggcctttccacgggtgacggtcagttccagcctgttcagcctcgaccgcgaccggctcaccagttcaggcggcacggcgcccctggacatgatgctgcacctgatcggccgtgatcacgggcatgaactgtcggcggcgatctcggacatgtttgtctacgagcgcatccgcaacgagcaggaccaccagcgcgtacccctcaagcacatgctcggcacccagcagcccaagctgcaggaagtcgtggcattgatggaagccaacctggaagaaccgatcaacctggatgaactggcggcgtatgtcgcgctgtcgcgtcgccagctcgagcgcatgttccagaagtacctgcactgttcgccctcgcgctactaccttcgcttgcggctgatccgcgcgcggcagttgctcaagcagacaccgatttcaatcgtcgaattggccgtgctctgcggctttgtgtccacgccgcatttctccaagtgctatcgcgagtacttcggcgtgccgcccagtgacgagcgttccgtcacggacagcgagcggtccatcgtgctcaagccggcgttgcacacattgccggcgcccgcgccaatgaatgtattggagcaggcgcggggcgaggcaacgtttgccagtgtgaaaaacctgaagccctgaactcagcgcatatgcaagatgatcgggctgctgctcgccgggtcggtgtgcccgcgcaacttgctcaccgccttcacatccaccgcgccgccgttgttaccccaggtgccgcgcacatagctgagcacctcggcgatttgcgggtcggtcagttgctcacggaacgccggcatgcgataggcgtccggcacgccagccgtcaccacgcgttgcgagccgttgagggtgatgttgatggctgaggcgctttccttggccagggccgaggtggcgccggccaggggtggcatccattcgggctggcccttgccgtcaaggccgtggcacgaggcgcagcgggtcgcgtaggtgtgggcgccgggggtgtccgggttggcggcgaccgcctgatactgccagggagtgccgtcgcgctgtgggtcgccgggcagtgacttgaggtagcgggcgatggcggccaggtcgtcgtcctgcatgaactgcgtggagttgttgaaggcttcggtcatcgaaccgtagaccaccgcatgggcattgcgcccggtcttgaggaactgcacgatctgcgcctcgtcccagcggcccagtccggtgttggggtcctggcgcaggctgggtgcataccagccgtcgagcagggcgccggcaaggaacggcgcgccggcctcatccagtgctttctcgttgaaggccaggccgcgtggcgtgtggcaactgccgcaatggccggggccttggacgatataagcgccacggttccacagcgcgtcctggttgggtttggccgcgtacggcgcggtcggtgcgaacacgccgttccacagtgcgatgggccagcgcaggttgagcggccacggaatatcactggggatattcggctggttggccggttgcacgccctgcatgaagaacgcgtacagcgctttcatgtcgtcgtcgctgagcttgacgtaggacgggtagggcatcgccgggtacaaccgtcggccacccggtgccacgccgtggcgcaccgcgcggtcgaagtcggccaggctgtaggtgccgatcccggtggttttgtccggggtgatgttggtggcatggatcgcccccaacggcgtggccatttccaggccaccggcaaacggcgccttgcccggcaggctgtggcaggccacgcagtcgctgacacgcgcgacatattcaccgcggctgaccagagccggctcgaaggtggcgttggccggtgtttgtgcaaacggtgtagcggtctcacgggtgacgtaccaggccagcaggcctgcggcgaccaggcagggcagcgccagccagcctgcggttcttgcgaatcgacggttgttcatgggcatttcctgaaagtcagctgaaggtgtgtcggctcaagggcaggctgcgaacacgctggccggtcaattgcgccactgcattcgccacggctggtgccacggcgggcaacggtggctcgccgataccgcccatcttttcgccactctcgacgatccgcacatgcacccgcgccatctgcgccggcgccaggatcggatacaggtcgtagttgcgcgcccgtggcttgccgtccacgtacaccgcttcttccagcaaggtctgagacaagcccagcgccaccgcgccattcacctgcgcctcgacaatcgccgggttgacgatgctgcccgggtcaatggcctgccagatgtcgtgcacccttaccttgccattctcgatggacacctcggcgatcgccgccgtgtgcgaaccgaacggcgatgccatggccacgccgcgtgcgcgccggctgccgtcttcagcggtgaaggggccacgcttccagccgccggacagttcaaccgcggcgttcagcagggtggtcagccgtgggttgtcgcgcagcaggtgcaggcgcagttcatagggatcctgtttgcccttgtccgccagttcgtcgaggaacgattcatagaaaaagtcattcagcgaattgcccaccgaacgccagtagccgagcatgggcgcgcctttgacgtagatctgcgcgatgcgtttgttggggatggcgtaggacttgcccgacaatccttcgaccgccgtggggtcgatcttgtcgccctgtttgccggcgagggcttcggtcgggccttcggtggcgcttaccgcttcgatggccaccggcaggcctttgtcatccagtgcggcgcggaacttgaccacggccaccgggcgcaatacatcgcgcaggaactcttcctcacgactccagatcagcttgaccggacggcccaccgccttggcgagcgcgatggcctgcgggtaggggttggccgactcatataggaaatgccggccgaaaaagccgccgagcaacggcgagtgcaggttgatcttcgctgcgtccaggccggtgcgcttggcgatgtcggtgcggaacatgtccggcgcctggttgggcagccagatatccaggctgccgtccgggttgaagcgggccagggcggagggcggctccaactggccgtggttgaggtactggttgtgatacgtcgcttcgacctgggtcttggcgcctttcagcgcggcggccacgtcgccttctttctcatcgtcacgggccggcccttgctgggcggcgaggaactcgaaatgcttgtcgctggagaagtccgccggcatcacgcgcagcgtcgagtcggcggccgcttcctgccagtcgacctggaccgcttccaccgcacgcttggcgtgccaccagcgttcagccaccaccgccaccgcaccgggcagtacgtgcactgaatgcacgcctttcatgccttcgacctgtgtctggttacgcaggctgcccacggtcatgcccaggcgtggcgcatgctggacggcggcgtgaagcatatcgtcgactttcaggtcgatgctgtagagcgccttgccagtggatttgtcgtaggcgtcgaggcgcttgaccggcttgccgatccagcggaactggctcggatcgcgcagggtgatgctggcgggatcgggcacgggcatgtcgagggcgctactggccagttcgccgtagcccagcgagcggcccgatgctgcgtgcacgactcgaccaggctgggtggtcagttcgcccaccggcacgccgaattgtttggcgccggcctgcagcaacatcgcgcgggcgagggcgccgaggcggcgcatggtcgggtagctcatgcgcaccgacatgctgccgccggtgatgcgcaggccgttctccatcaccacataggtttcgccgggcggcgcggcctcgacgatgaaagtggcggggtcggcatccagttcttcgccgacaatctgcgccatggcggtgtgggtgccttgcccgccttccatgaaggggctgagcaggcgcaccgtgccgtccgggcgaatctccagaaacgccggcacctgggtaccgcgttcagcggcagtggcggcttgcacccggcccgagcccagtggcaggccgaaaccaatgaccagcgcgcccacggcggtgctcgccagaaagcggcggcgtgacaggttgaccggtgcatcgagcagttcgttgaggatgttcattacgcgccctcctgcttggccagggcatcgacggccgcatggatggcgttgtacgtgccgcagcggcacaggttgatcatggccgcgtcgatctgcgccttgctcggtgcgggggtgtgcttgagcagcgccgtggccgccatcacctgcccggactggcagtagccgcattgcgccacctgttgctcgacccaggtcgcgaccacacgcttgcccacctcgtcgtcttcaatcgcttcgatggtggtgatttcccgcccgaccaccccggccaccggcgtgacgcaggagcgcaccacattgccgtccaccagcaccgaacaggcgccgcactgggccaggccgcagccgtacttggtgccggtcaggcccaggtcatcgcggatcacccacagcaatggggtgtccgcgtcggcatcgacctgataggccttttggttgattcgtaattccatggctcacctgctgatcatcggtaggtgcggcctgttttaggtgtgaacgcagtggccgcttattgtcgaactctagaccagcgcgcaagggctatctatccgttaatcgataagtcggaggatcaggcaagtattcaagagaaatgggccagtctggtgttatcgaggcggcgattgatccaggtcaatgcaaggtcggatcggcgggcatgaatgggcagggcgggcgtagagcgggttgtagcggtgatatcatggcgccactattctggcgcggtgcgttactgcgacccatggaaatgaggctttaggcaaatgctcaagaatgcaccactgcgtctgaaactgttgttgatcctgctactgcccatgctcgggttcctgacgttggccggcgtgttcgtggtggacaactacaagacgctgcgcgacatggacgcgaccgtgacggccagcgccaccgcgcagaagctgagccgactcattaccacgctacaacgtgagcgcggcgccagcggggttttcctgggcagtggcggccagtcgatgggcgacaggatgttgcagatgcgccaggactccagcgcggcggtcgaggtggtacgcggtttgacggcatcgggtggtgcgagcctggatggcgtgctgcgtgccttggaccaactgccggcaacccgtgggcaaatcgacaaactgagcctcaatagcaccgagtccggcgcgcgttacaccgagatcatccaagccctggtcgggtatacccattccctggaagccagcgtcaacaacgcgaccctggtctatgccctcggcgccttgaaccaattcatcgaaatgaaagaacgcgccggacgcgagcgtgtggtgttggggctggtattcaaccaggaccactttgatgcgacgctgctgtcgcgcttcagccgcaacctgggtgagttcaatgcctactacgatgcgttccgccgcaaggcaccggtagtcacgcttcaacaattcgatgagcacatgcaaaaccccgccgccgtggaagttggcaggttgcaacgcctggcgtttgaagtgccgatggggcaggcgctgggcatcaggccagaggcgtggtttgaaacctccacccgccgcatcgacctgatgagccaagtggaagaagccctgggccaaagtgtcagcgacctggcgaagcatgagcgcgatgccgccagtcgtgccctgtggttgaccattggcgcggtggttgtggccctgttggcggtcgtggtgttgtcctggctgatcatccgcatgatcggttcggcggtgcgcgacctgaaccgggtactgaacgacctggcgcagcgcgatctcacggcacgggcgacgtaccagagccgggacgaattcggccagatctcacacaacctcaaccgcatggcgcaagagatcagtggcgtcgtgcaggaaatcggcaacgccaccgcccaagtggcgacggcggcggaggagtcctccacggtcacgatccagaccagccagagcgtcgagcagcagcgccagagcaccgagctggtagcgacggcgatcaaccagatgagcgccaccgtgcgcgaagtggcgcacagcaccaacgatgcggcgcagatgtcgcagcgggtcaataccagcaccgcacaagggcgtgccgaaatagaaagcaccatcgcgctgatccgtcagctctcggggcaggccgaggaaaccgcgctgatcattggtgatctgaaacaggaaagcgacggcatttccaccgtgcttgacgttattcgcggcattgccgagcaaaccaatctgctggccttgaatgcggcgatcgaagcggcgcgggccggggaccatggccgtgggttcgccgtggtggcgtccgaagtccgtgtgcttgcgcagaagacccaggagtccacgggcagcattcagcagatgatcagcaacctgcagaccggctccgaccgtgcggccacgtccatgcaggaaaccctgggcaaggcgcaggacggtgcgagcaaggtggaacgtgcgggtgagttgctgcaagagatcgctgaaggggtgtcgggtatcagtgatcgcaacatgcagatcgcctcggccgccgaagagcagagtgcggtctcggaggacatcaaccgtaacgtcaacgagatcaatgacctggtgatccaggtcagtgccggggccgaacagacggccgttaccagccaggagctggcgcgcctggccgagcagcagcaacgtctggtcaatcggttcaaggtggcctgatcgattggcgcacagcacgccctgccgaatgcagccacctgcgtcacagggcgttggttaagcgaaatcttcctcgaagtgttcccgctcacctcgcgtgtcgccctggcgccgcaccacctccatctgccgcagttccacgcggcggatcttgccggagatggtcttgggcagttcgctgacgaactcgatacgccgcacccgtttgtaaggcgccaggtgctcgcgggcaaaggccaggatgtgccgggccagctcggcgtcgcccggcgcatcatgggccaggatcaggaacgccttgggcaccgccaggcgcaacgggtcggggctcggcaccacggccacttccatgaccgccgggtgttcgatcaaggcgctttccaactcgaacgggctgatgcggtagtcggacgccttgaacacatcgtcggcgcgcccgacgaaagtgatgtagccgtcggcgtcgacctgcgcggtgtcgccggtgcggtagtagccgtcgcgcatgacctcggcggttttctccgggctgtcctcgtagcacagcatcaggccgagggggcgcacatccaggggcagggcgacttcgccttcgctgcccggaatgccgtccgggtcgagcaaggccacctggtagcccggcagcgggcggcccatggagccgggcttgagtacctggcctggcgtgttgcccaccagcgcggtggtttccgattggccgaaaccatcacgcagcggcaagccccaggcgtgctggatctgctcgatgatttccgggttcagcggctcgcccgcgccgaccagttcgcgcaggctcaggcgtgatttgtagctggcgagatcctcctggatcagcatgcgccacacggtgggcggcgcgcacaggctggtcacgccgtagcgttccaacgcactgagcaaggccggcgcgctgaaccgtgcgacgttatggataaagatgcacgcgccggcattccacggggcgaacaggcagctccaggcatgcttggcccagccgggtgacgagatattaaggtgcaggtcgcccggctgcaggccgatccagtacatggtcgacaggtggcccaccgggtagctctggtggctgtgcagcaccatctttggcttggatgtggtgccggaggtgaagtagagcagcatcgggtcggtggccagggtgcgaccttcggcctcgaagtgctcggggtgttcgaaggcggcgctgtgggccacccaaccttgcggcgccgagcccacgcagacgcgactgcaaccgtccgccagcccgacgaatttatgcacgtgggcttcgccgaccaccaggtgacgcacctgcccgcgttcgatgcggtcgcgcaggtcgtcggggttcagcagggcggtggcggggatgaccacggcgccgagcttgaacgcggcgagcatggtgtcccacagcgccacatcgttgccgagcatcaacagcacccggtcaccgcgacgcacaccgagggcgcgcaagtggttggccacctggttggagcgcgtggccagttgctcgaagctgtagcgctgctcactgccgtcttcttcgacgatccacagtgcatctgccgcgttgccctcggccattgtgtcgaaatagtccagggcccagttgaattcgtccagttgcggccaacggaaatcccggacagcggtggcgtagtcggtgcggtgagcgagcagaaaatcccgagcggccaggaagggctgggtcatggtggctgtccttaattattgttgtggggactgaccccccggctggaccgagaggctggaccgagtataggcacgcataaatcagagcagaacgctcaaaaacaccggtgcgttgtgcaaaaaagtcatgggtgttgcgccaggcagcagtgagattgacggttaagacataaaagtccaagatggaattataagtacaaaaacatgcgattcatctctttcccactcttgccaaaccaacaacaacttgcgagaacccgatcatgaagaaacgctccctcgtcaccgtcctggccttgagcctgcttgcatccggccccttggccgccgccgagaaaaccctgcgcatcggcatcgaggcggcttacccaccgttcgcgtccaagaccgaggaaggcaagatcgtcggcttcgactacgacatcggcaatgcgttgtgtgcgcagatgaaggtcaagtgcgtgtgggtcgaaggtgagttcgacggcctgattccttccctcaaggtgaagaaaatcgatatggcgctgtcgtccatgaccatcaacgaagaccgcaagaagtcggtggatttcacccacaagtattacttcacctcatcgcggctggtgatgaaggaaggcgccgtggtggacgaccagtacgccagcctcaagggcaagaccgtcggcgtgcagcgcgcaaccaccacggatcgctacgccaccgaggtgttcgagcccaagggcatcaacgtcaagcgctacaacaataacgaagagatctacatggacctggccgccgggcggctggatgcgatcttcgccgacaccatccccttgaatgacttcctgcagatgccccgtggccagggctacgcgtttgtcggcccggaactcaaggacccgaaatacgtgggcgagggcgccgggattgccgtgcgcaagggcaatagcgagttggtcagccagttgaacgcggccatcgacggcattcgcgccagtggcgagtaccagaagatttcgcagcagtacttcaaggccgacatctacggcgactgacgcccaggcaaactcgatcaatgtgggagggggcttgcccccgatagcggtctttcattgccagatgtattggctgatgcagcgccatcgggggcaagccccctcccacatttgatttacagtgttcgatcaggtttttaattctttcaaatgcttgtagaccgtcgcccgccccatgcccagcacattggccacatagttcgacgcgctcttgcccttgaacgcgccttcggcatgcaacgccagcaccagctcacgcttgtggtcgcgcgtcagcaaattcaggctcaactgccgctcgcgcaaccacgcatgcaaaaacgtgttgatgcgttcctgccagtcatcacgaaacaacgcgtccggctgcgggatcagcttgctcggcgacaggaacaagtccagcgccgccttggcgttttcaaacagtgaaatattcaggttgatgcacagcaccgccaggcgtcggccttggtggtcgtgcagcacggtgctcaggctgcggattttctgaccgtcccagttgagcttttcgtacgggccgatattcacctcgctgacgtcggcgtcgagcatgtcctccagcgccgagtcatcgccgatgctgcgcttggacaggttgttggcgatgtaatcgaccttttgcgagcgcaggtcatgcagcaccgcttcggcgtgggggaagaacagcgtggcgatggcgtcggccattgcgcggaagttctgcatgacggtgtcttgttcagcggtgttcatcaatggggctccaggcgggcaggggagagcataccagcgtcgaggccgaagcgtgtcagcgcctccggcagcgctgcgccgcgcaccagtgcggcactggcctggcccatggccggtgaggtctggatgccataaccgccctgtgccgctacccagaacaggcctggtaccacggaatcaaaacccgcgagcaaatcaccgtcgtgcacaaagctgcgcagaccggcccaggtgcgggtcgggcggcggatggtcagggtcgtggcttcttcgatctggtagatgcccatggcgatgtccagttcttcaggctgaatgtcctggggggcgaccgggtcggcgttggccggtgagccaaggaacatgccggcgtcgggtttcatgtagaaggattcgtccagcgccaccagcatcggccagtgatgactgtcgacgccgtcggggccggcgaagatgaacgccgagcgccgcttgggctgcaagccgatggacgcggccccggcgagcccgccgatgtgatcggcccaggcgccggcggcgttgatgatgatcggcgcggtgtaggaggcgtcctgggtttgtaccagccagatgccgtcgccgtcgcggctcaagccgagcacgtggctgtcggtacgcacctcgccaccgttgcgacggataccgcgcaggtagccctggtgcagggcgtcggtgtcgatgtcactggcggtggggtcatacagcgcaccgtgaactttttcgcggcgcaggatcggcaacttcgcgcaggcctggtcggcgctgagcagctcgacctgggccacggtggccttggcactctggtattgggtgttcagctcggctgcatcaccgatgaagtccacggtcatttcgccccgtggcgtgagcaacgggtgttcgcagaaacccggcggcgggttgtcgaaaaacgcccggctggccagggtcagcgcccgcacctgcggggtgccataggcggcgctgaacagtgccgccgaacgcccggtggagtgataggccgggtggctttcgcgctccagcacgagcaccttgccgtgctgcgacaaccagaaaccggtggaggcgccggcgataccgccgccaatgatgatgaaatctgcgtggttcatagctgtctccagagggcattggccagggcgatgtcttccaggcccaggccgatggagcggaagaatacatgacggtcgtaggtcggaggttgcacccattcgctgagcagttcgggcaagtcccccacgatggcacgcgggtcccacccgtgttgttcggtggcgatcagcatgtcacctgccgcgctaggggtggtctggcgatagtcgcagaatacctgcatcgcgttgaggctgtgcggcggcacttcgtgggcacgcggcgcattggtgctgatcgaggtgatcagcgccggtttgctcaagcgggcggggtcgagcaccggtccggccgacgaggtgcacagcaggatcacatcggcgtcgtccacggccgcatcgcagctggcggcgatgaccacccttgggtccaggcgcttgagttgggtgatagcctcggcgctggcgttggccaggctcggcgaaaacaggctgatgtgctgccagtcacgcagttgtttgacgtagtgcacatgcgcctgcgccaccttgccactgccaatgatcgccaggcgccttgcggataatggcgccaatgcctccaccgccagggctgtggttgccgcagtgcgggccgtggtcagttcggcagcatcgcacagcagcaggggttggccggtctgcatcgacatcaacaaggtccaagcggtcaccagcggcccttgctcacgcacgatatagggcgaggtcttgaccccgtacaccccatcctcggccagcacgcccaggtagttgataaagtcaccggcggcgcgtggaaactccaccagctgctgcgccggctgcacggcttgcccggccgccaggtcctggaacagcttgcgcaggatctgcggcacatcgacttttccgagcaattcgcgggcctgggcctggtggatcatatggggtgtgctggacatggggatctccgcaagtaaactaatttgtccattatggacttttagtttctttgggcaagcgtaaaagatcaccccgtaaagcgaaacccacccgacaattcagttttcagaaaccccaccaacgcactcaccgccttcggcacatggggcgaatacggtcgtatcaaatagatctcatcggcaaacgcgcccttgagcgtccagcccttgagtacctgcaccagcttgccgctggccaacgtggcgtgggcgctgaagtcggggagcagggcgatgcccaggtggttgagggccgcatcgcgcagggcttcgctgttgttggtggcgaagctgccggcgatgggcacggtcacacgctcgacgtttttgctgccgcgctcgaaggtccaggcgggctggtcggtgccgcgtgggtagaacaggcagttatgggcgcagaggtcattgggttcgcgcggttccccgtggcgttgcaggtattcccgggtagccaccagcaccgagccggtgtcgcacagcttccaggccacgtgggtttccggcacctggaagccgtgacgcacggccaggtcgtagccttcggcggccagtgaactcagggcgtcggacacgtccagctgaatgcgcacctgcgggtactgttgcaggaattccgacaagtgcggcaccaattgctgacgggcgaacgccactggcgcggtcagccgtaccagcccgcgaatctcgccgaccgagtcgcgtaccgaggagaagctgcgggcgatctgctcatacgcgctgcgcacttcacgggtcaacgacagccccgcgtcggtcagcctgacgctgcgcgtggtgcgggtgaccagtcgcgtgccggtggctttttccaggtcggaaatacgctggctcaccgccgacttgctcacgcccaggcgtgcggcagcggcggtgtaggtgccttgttcctccagcaccgacagccagtggatgtgcgtccacagcccttcgatctcggatttttccatgggtgcattgttcgctatggtggacaattagttctggattctgctctggtttggaacaaaccgaaagcctatcgtggtccccaacgctatccacctgggatccactgccatgaccacgaccatcgagcactacatcaacgaccagcgcgtgtcccgcgacgatcgctatcaggacgtctacaacccggccaccggcgaaaagaccgggcgcgtcgccctggccagccgccagaccgtgtccgaagccgtcgccgctgcccaggccgcgttcgccggttgggccgacacgccgccgatccgccgtgctcgcgtgctgttcgaatacctgcacctgctgcgcgaacgcaaggacgacctggcgcgcatcatcgtcgccgaacacggcaaggtcttcaccgacgcccagggcgaagtcgaccgtggcatcgacattttggagttcgcctgcggcatccccaacctgctcaagggcgagcattccgaccaagtgtcccgtggcatggacaactggacgatgcgccaaccgctgggcgtggtggcgggcgtgacgccgttcaacttcccggtgatggtgccgatgtggatgtacccgatcgccatcgcggcgggcaacaccttcatcctcaagccaagccccaccgacccgagcgcctcgctgttcatggccgaactgctgcgtgaagccggcttgcccaaaggcgtgttcaacgtggtgcagggcgacaaggaatcggtggacgcgctgatcgaacacccggacgtcaaggccgtgagctttgtcggctccacgccgattgcccaatacatctacgaaaccggtgcgcgcaacggcaagcgcgtgcaaggcctgggcggcgcgaaaaaccacatggtggtgatgcccgacgccgatatcgaaaaaaccgccgacgccttgatgggcgccgcctacggcagtgccggcgagcgctgcatggccatctccgtggcagtgctggtgggcgatgtgggtgacaaagtcatcgcggcgctgaccgaacgcgccaagcacctgcgcatcaccgacggtcgtgacctcaaggccgagatgggcccgattgtgtcccatgccgccctggaacgcatcagcggctacatcgaacaaggcgtgcaggccggcgcgcaactgctgctcgacgggcgtgactatgtgccgactgaggctggccttgaaaatggcttctggctcggtgcgaccctgttcgaccacgtgacccgagaaatgagcatctaccgcgaagaaatcttcggcccggtactggcctgcgtgcgtgtgaatgactttgccgaggcgatcaagctggtcaacgaccacgagttcggcaacggcgtcagctgctttacccgcgacggcaacatcgcccgcgaattcgcgcggcgcattgaagtgggcatggtcggcatcaacgtgccgatccccgtgccgatggcctggcacggctttggcggctggaagaaaagcctgttcggcgacatgcatgcctatggcaccgagggcgtgcgcttctacaccaaacagaagtcgatcatgcagcgctggtcggaaagcatcgagcagggcgcggagtttgcgatgccggtgtcgaagtaagcgccgacccgaccctcattgagcgatccacacgctgacgcacaacccttgttgcgccagcgtgtcgctgaatgccaactgtactcggcaaccggtacgctcgctgatcgccttgacgatcgacaagcccaagccggagccggcttgctccgagccgaggctgcgatagaacgggtcgaacacccgcagctgttcctcctcggcgatgcctgggccggtgtctttgacttgcagcagcacgccaccttcaatccccttcaccgacagatcgatacgcccgccttgcggggtgtagcggatggcgttgtccactaggttcttgaccagggtgaacaggtccagttcgttgaacagcacctgcacgtcctcggtgctttcgacgccgatatcgatctgcttgcgctcggccaggggcagtaagtcttccagcacctgtcgataaaggccatgcaccgacagcggcgtttgcacccgcgttgacggcgcttgcgccgccgccagcgccaacagttgatcgataaggttgcgcccgcgctcgataccccgggacagcggcaaaaaccgctcgcggctgaccgctgacaagtccgtcgcggccaggcgttcggcttgcagcgacagggcggtcatcggtgagcgcagctcatgggcggcgtcggcgacaaagcgacgctggctgtccatggactggccgacgcgggccagcaggcgattgatggcgaccacgaacgggcgcacttccgtgggcagatgctgctcgtcaatcgggtgcagtgcctgttcgtcgcgctggtcgatctcggcggccagtacgccgatggggcgaaacagtttgcgcaccaggtcgcccaccaccagcaacagcacggggaacaggatcaggaacggtagcagactgcgccaggcgctctcgcgggcatccttgtcgcgggcgtcctgttcctgggccacggcgatacgttcgccctttgaggtggtgtgcaccagcacccgaaaggcttcgccggccacttgcaccgtggcgaggccatcggcgagcgtggtggggaacggcaggggcaacgcctcgtcactgccgcctgtcgcctggttgccatcgcccaggtgctggatgatcacccgcgattcttcatcatcgccgtcaatcgccttgccctgggggtagtgcagcgtcatctgttggcggtcgaacagcatggccacctggcgcaaggtggcgtcctgttgttcgtgggcttcatcaaaggccgagacaaacgcaaacacgctggccagcagcgccaccaacagaatcgccagggacagcgtcaccgagaggcgcagctgcaccgactcgctcaaacgttttttgaaaccatccatcccatgcccctgacgttcttgatcacgtgactgcccaacttgcgccgcaaggcgtgaatcaggaactcgatggcgttgctttcaacctcattgccccagccatacaggcggtcttccagttcgctgcgtgacaggattgctcccgggcggatcagcaaggcttgcaacagcgcaaattcacgactggacagggccacgccacgcagttcctcggtgctggcttctttggagagcaggtccagcgacaccacgccgttaccgagcaacgacgacgcgctgccgcctttgcggcgcagtacggcgcgcatgcgggcgagcagttcgggcatgtcgaaaggtttgagcaagtagtcgtcggcaccgccatcgaggccacgcaggcggtcatcgaggctgtcgcgggcagtgatgatcagcagcggcagcgcgttgttgcgcgcacggatgatctccagcacttgcaggccgtccttgccgggcaggccgaggtccaacagcaccaggtcgtaggggtgggtgtcgagggcggccagggcggtgaggccgttcttgacccagtcggcggcgtagctggcgtcgctgagggcgcgctggatcgcatcgccaatcatggggtcgtcttcgaccagcagtatccgcatatccctctccgaaaaaaacgcggcgagatcatcgccgcgtctgtattgaagcatctgggcagacatttgtccggcatcagcccttcatcgtatcgaaggccttgagcaggtcatccatcgcggccttgcagtcggcctggttcgggctgcctgcgcgcaacgcctccagtgcgcggtcgatggctttatccagcacatgccagtcactggcggcgcggggcttgattccggcttcagcggagtcccagctggtttccaggtccttaatgcgggctttggccgcgggcaggtcgttcttggcgacgagggccgatacgtccaccgcgatgttgcggaactcggacaggtcgcccagtttcgacgcctggtgttggctggcggcggcacgggtggtgtccttgggcttatcggcgggtttggagcagccggtggcgatgcccagcatgaagatcgcagaaacaatggcgacgcggcggatcaggtgttgaacagggcgcatgaggatttccttgagtgggttgttcatgaggtgatggctttgcggttgccgacgctcagttgcgctacggcgaccagcaggacaatgacgcagaggaacagcgcgctggtccaactggcgcccatacccaggccgccgtaggtcttggcttgggtgagcaggtcgccgagggaggcgccaaacgggcgggtgaggatgtaggcgatccagaaggtcagcacactgttgacccccaggcgccaggccaccagggccacggcgatcaaaccggcgaagatcaccgcgccgagggtgaagcccaggcccagtgcttcggtggccaggtcgccggcggcggtgccgagggcaaaggtgcagagcaccgtggtccagtagaacccttcacgccgaggagtgacgatgtcgcggatcgacaggctgcgttcggtacggaaccagaccatgaagttgaggcccagcagcaccgagaaaatcgccgtgctggtgtacaggctcacgtcgagtttatcggtgagaatgtcggtgatctgcgtgccgacgatgctcaccagtactacggtgagccagtagatccatggggtgtaggctttggtgcgcagctgcaagcacagcgcgcccgccagcagcgcggccatgccgaggctggtccagccggcgccgaaaccagcgtcgacggcgaggtagtccgcgccggtttcgcccacggtcgtggacaggattttgatcacccagaatgacagcgtcacctcgggtactttgttcagccaacgggctgctgtggcattcatcgggttacctctccttgatggcgcggcggtgggcgcaggagagaaggtaaaccgcgaaacttagctgggactgagggccgctgcgtttttacagcacatgggccaaacccagcgtggtgaggtgcaccacgctgcccatgttcggcgcatgcaggcccgaactgcgcaccaggatggcttggccgggcacaccctcatccggttgcaacgccacggtcagggtgcaggtgttgccaccgaattcgcgctcggtgaccacgccacggcaaccggaatcgtcggtggtgctcaggtgcagttgctccgggcgcagcatgatgcgtgcagcaccgtgattggcctggcggtcgaccgacacacgccccaacgcgcagtgggcccagccgccctcgatttgcgcgggtatgactacggcctcgccgagaaacaatgcggtctgttcgtccacggggtactggtacaggtccatcggatgccccgattgcaccaggcgcccctggcgcatcaccgccaactggtcggcgaacgacagcgcctcactttgatcgtgggtcaccagaatggtggtgatgcccgcatcgctcagcagccgtgcgaccatcttgcgcatggccgagcgcaggccggtgtccagtgccgaaaacggttcatccagcagcatcagccgcggctgttgcgccaacgcccgcgccagcgccacccgttgctgctggccgccggacagttcgtgaggccaacgttgggccatgttggcgtccagggacacgctgtccatcagctcggcgatgcgttcgtgccgcgtggcgtgtctggtggcaaggccaaagccgatattgtcggccacggtcatgtgcgggaacagcgcgccgtcctgcggcacataaccgatctggcgctggtgcgcgggcacggcgtgggtggcgtccaccagcacctggccgttgagggtcaggctgccgctgtcggggaattcaaaaccggcaatcatgcgcagcaaggtggtcttgcccgagccggatggtccgacgatcaccgtgcggctgccgttgggcactgccaggctgacgtcggccagggcgcgcagggtgccgaaggtcttgcagagggcgtggagttcgagggcgttcatcggcctgccgtgcgtttggattggtggtaaaggaggccggtcaacggcagtgagagcaggatcatgatcaacgcgtaaggtgctgctgcggcgtagtcgatctcgctggtcatcgcccagaagccggtggccagggtgcgcgtgccgttgggggcgagcagcagggtggcggtcagctcgttggtgatcgccaggaacaccagcgccgcgcccgctgcggcagccggagccgccaggcgcatcgtaatcagccacagggcgcggcccggcgagcggccaaggctgcgcgccatgttttccagctccacaggcgcctgggcgataccggcgcgcaggctgactagcgcccgtggcaggaacatcagcaggtaggcgagcaatacggtgatggtggtctggtagatcggccgggcgaagtggatagtcaccgtgaccagcgccagcgccacgacaatgccgggcaacgaactggtgatgtagttgcagctttccaaaatgcgttgcaggcgccccggtgcacgaatcgacagccaggcaatcggcaccgccgcgcaagtggtcaacaccgcaccggcaatacccaacagcacggtttgttccagtgccggcagcaactcgctgaactgccagacctcgcgaccaccggcgatcagccatttgcccagggtgaccagcggcacgccgagggccaaggcaccggtcgcggcttgcaagccgagggcgagcagggtggttgcggggctcagccgcacgatgcgttgctcgcgggcgctgccggaaccgacccgcgcataacgtgcatggccgcgagcggcggactcgacgctgagcatcgccaggcaacacagggccagcaccgccgcgagcatattcgccgccgggccgttaaaggtggatttgaactgatcgaaaatcgccgtggtgaaggtgtcgaagcggatcatcgcgtacaggccatattcggccagcagatgcaggcccaccagcagcgcaccgccgcagatcgccaggcgcaactggggcaacaccacgcgccagaacaccgcccagggcttgaggcccagggactcggccacgtcttcaattgcagggtccagccggcgcagggtcgccgccaccggcaggtacagaaaggggaaataggcaatcaccgacaccagcacgccagcgggcaagccatggatcgacggcaccaggctgacccacgcgtaactgtgcacaaacgccggcaccgccagcggcgcgaccgccagcaacgaccaggcgcggcggccgggcaggtcggtgcgctcggtcaaccaggcgagcgcgatgcccaacacgatgcacaacggcaaggtgaacagcaccagcagcacggtgttggtcagcaactcgccgacgcgcgggcgccagaccagcgcttcgatctgcgcccagccgatttgccacgacacgccgattacaaacgcgatcggcaacagcgccaacaacgaaaccagcaccgacaaaccggtgacccaggtgcccccacggcttttgaacaggctgtgggggcgtttgcgtggcggcgcgtgggcgatgccgggaatcgacgattcaggcagcaatcagagcagtccggcctgggtcatcaactcgacggccttcttgctgttgagcttggacgcgtcgaccttgggggcatccagttgtgccagcggggtcagcttggggttggattgagcgttctcgccgaccgcgtattcaaacgagttaccgtccttgaggatcgcctggccgtctttgccggtgatccacttcaagaaggcctgggcctgctcctgatgcttgctggaggccaagacaccggcaccggagatgctcacaaacgcgcccgggtcctggtgcttgaagtagtgcagttgggtatttttgctgttttcgccggtcttggattggtcgacgaagctgtagtagtgatagatcacaccgctgtcgacctggccggcgttgacggccttgagcaccgcgctgttgccacggtagatgctcgcgttggccttcattgccttgagccagtcaagggttgcggcttcgcccttgagttcgagcacggcggcgacgatggcctggaagtcggcaccggccggtgacgcggcccagcggcctttccagctgggcgacgccaggtccagcagggatttgggcaggtcggcttctttcaatttgctcgggttgtacacgaacaccgtggagcgcgcagcaatgcccacccatttgccatgggccgggcggtaggcggcgtccacctgttcacgcgtggtcggcgcgaccggggcgaacaggcccgcattgtccaccagcaccatggccggggagttttcagtgaggaacacatccgccggcgaggccgcgccttcctgcacgagctggttgcccatctcggtgtcgtcgccattgcggatggttaccggaatcccggtttcctgggtgaagccttcgacccacgccttggtcaggctttcatgctgggcgttgtacaccacgatgccgaccggctcgctggcggcatacacatgcccggcactgaccagggccgtggcgagcagggcttgtttgacgaacgaggggaggcgagtggtcatgcggtgagcgctccggggttttttgactgcacgggaaatccgcgagaggtcgattgagagtagaccaataggaatcatttgcatgttggggcgcggcgaatgtagagctgggaatgagaaaaaaacgtcaaaaatacagttaacaaatgtgatgagggtgatcaggcgtagcaggccaaaagcgggaggtggtttggttgtttttcaacatgagggttgacggccaaggtaatgccgaatactgtacataaacacagtgtttagcgctgaccaaccaaacctcggcaacctcagccatgccaaacactgtgtgcaagttaacggattaacttgatgcacaggctcgttttaccgagccatttttattgatagagagggaactcatgtcctacccagaaagcaaactcaccggtctgatcggtttcgcccaagccgcaaaagtgacaggtggctggtccggccctgtggtcagtatcaccacgctcgatcaactcaaggccaatatcggcgacaccaccccacgggtactggtgatcaacagtaatatctcggcgtcgagcctgaccaaagtcaacatgggcgccaacaagaccctgattggctcgttccagaaccgtaccctggagaatattcacctgcgtgcaacggcgcagtcgcagaacatcattctgcagaatcttatcttcaagcattcggcaagtatcaaggccaatgacgatatccaggtctacttgaactacggcagcaagtattggatcgaccattgctctttcgtcgggcacagctggtccaccactgacggtagcgaagataaactactgtatatcggggaaaaggccgattatgccaccatcagcaactgtttctttggcagtcataagtatggtctgatcttcggtcacccggcggatgataacaatgccgcgttcaatggttacccgcacctgacgctgtgccataaccgcttcgacaatatggaagtgcgtgcgcctggcttgatgcgttacggttattttcatgtgtacaacaactacatcaataacttccacctcggttttaccctggcacaaaatgccaacatcctttctgaaagtaactactttggcgaaggcagccaaaataaaggcatgttggatgacaagggcaacgggaccttcaccgacatcaacagcgtgccgccaatcactaatcagaagtcgcccaaggcgcagtggacggcgtcatccaactatggctataccttgaagaccgccgcacaagccaaggattttacccagaagaatgccggcgcccagtcggttgcactggtctttggtagttgattagctagctttctacttagtgctcacttaataccggtgccactgtatttatatcaaggatataaatacagtgatggcctttataatctaaataattcttcatgttgcgacaggcaggcttccatgttaaaccttgtttcgcacttgcagagccaactatcccttgctctttcagccactatcaagttgttggctgtcatgtgctatttaatcttcgcttgtcacttaagcgtcagcaaaaggacatcatcatgaaacatgcgaatcacacacccactcgctggacacgggccgatgcgctgaaagttaatgagaatgacccgacgacgacacagccgttagtgagtcctgactttcctgtcatgagtgacacggtctttatctgggacaccatgcccttgcgtgaacttggtggtacggtggtatcggtcaatggctggtcagtgatcttcaccctgacggctgatcgtcgcccccatgatccacaattcatcaacgccgatggccgttacgacatcaagcgcgactgggaagaccgccatggccatgcgcgtatctgctactggtattcgcgcaccggcaaggactggatcttcggcggtcgtgtcatggccgaaggggtttcgccgaccacgcgggaatgggcaggtacaccgatcctgctgaataacaacggcgatatcgacctgtattacacctgcgtcacaccgggcgccaccattgccaaagtcagggggcaggtggtcacctcggataccggcgtgaccctgcggggctttgatcaggtcaaatcgttgtttgatgccgacggtatctattaccaaaccgaagcgcaaaattcgacttggaactttcgcgatcccagcccctttatcgatccaaaagatggcaggttgtacatggtgttcgaaggcaacgttgccggcgagcgcgggacacacgaagtaggcccgaatgaaataggcctggtgccgcccgggcatgaagatgtcggcggtgcgcgttatcaggtcggctgcatcggcattgcggtggccaaagacctcaacggtgacgagtgggagattttgccaccgctggtgaccgccgttggtgtgaacgaccagaccgaacggccgcactatgtgttccaggacaacaagtactacctgttcaccatcagtcacaagttcacctacgcggacggcgtgacgggcccggatggcgtgtatggtttcgtcagcgaccggctgttcggcccttacacaccgatgaacgcctccggcctggtgctcggcaatccgccttcgcagcccttccagacatactcccactgtgtaatgcccaacggcctcgtgacatcgtttatcgacagtgtgcccaccactggcgatgactaccgtatcggcggcaccgaagcgccgacggtcaggattgtgttgaagggcgatcgttcgtttgtgcaggaggcttatgactatggctacatcccggcgatgcgcgatgtagtgttgagccagtgactgccgtgcaatcgtcagcctgatcatctggtgtaaaccgatgcaaaagtgggagggggcttgcctcctcccacttttttaaccgcaatccagttcggtggccgaagcactgtcgagcaagctggcggtgtagagcagggtgtgtcagtgcgagcatgtttaattgatgaataaataaactaatggatggtttaattggtgatgggaatttccttcggatggtattcgtcttacaaacgcagcctacagtattatcggtaggacttagttgctggtttgctggcggtttttttttatcgtgcaggaacgctctacagtgagcgtttaagatgtgtgataaaaaatcatgaggtgttttggcttgacaaatttatgtgcggataaataatttaatcgcttgctttaaaaggtgtgaaatcatttttttataaaaacaaggatgaaaatgatggatgctcaaaattcagtaaaaaacagatcaaatgaaaggctctctaagaatgagatttatagagtgtgcgaggccggttacaacgaggtggctaatgcaattgtccggcatgccgcgcttagggaacttgaaaaattcggcgagattatctctgctcgtcctctgacgcatcagggtatggccttgttttttggcaccctttgggctttttttaaagacgtgcctgcgggaatcgttgcgttggctgcacgtgttacggatgaatggatcaaggaggatatgtggaatggcacagccaaggctgcgcatattctttatgcttcggttgatgagtatggtctgcaccagcatagtaaacatatgctgcctacccatcatcagatgtttaaacaactgacgactcatctggggctttccgatgctgatctgtttaatccgtctaacgtactcccagagggtactgcgatggggaataacacgcataggatgtaccgctccgagtttttgggcgaagcgttgggttttcatttggcttcggaaatgacctcgtccagagagtttcagtactttcttgaagggtttaaaaaatacgcccgtgagtatggcttggtggatgaggaagacccggtcttggcgttcttcgctatccactgcgaagtcgaacccatgcacgtagcgaccgggcgggagatcgtaatttcatacttggagaaaaacccaggtatcgctccacaagccatgcgcggtgcgatggcattcatggacggttttgaacatatgttttcggcacttaatcgtcgccttgccgacccgcagagtctttgaattctggagattgtctacatgtataagtcttatgagtgtcagatctgtcactacgtttattccgaggcattgggtgagcttctagtcgacgttgaggcaggaacaaggtggggcgagctagacgacaattttcagtgtccgcactgtcgggcaaagaaaaaaatgttcagagagattgtgaggtaaatgcacgactttctgagtgcaatgctattttcgacactgctttcaataagcgttggaccgatagccttgatcattctaaggcagtccatcgtctttggctttcgcagtgcattgcccgcagccctgggggcggcagttgccgacgcggtatttgcagctgtcgcctttacaggcttgaaggtggtcgaagcattttgggtcgccaatcatcagctattgacgtggggagcgattgcctacctcctttatcttggtgttaccacattcaagaacgctgctggcacgatgcagataacgtgcaccgcaggatttgtaccggtctttttactgacgttgactagcccgttcaccattgcggcgatttcttcctatgccatcgccagcggcgcccagcttcaggggcagggaatctactggaatttgctgggtgttctagtgggctcgtttctcgggcaaatgttgtatgcagcagggggtggggggatgaagaagctgtttgctgaacgttcaggttttggtgtgctcaatcgagcgagcggggtgtgtctgattggatttgcgggctggcagatggcttgtgctctatcgctataggcttgcccccgatggcggtggatgagtcagctagaggtaagctgactcatccaccgccatcggggcgagccacctcccacattaatcctgcgttcctagcgccgacctgtgcgggtactcacatccacccaaaccgccaacaccagaatgctgcccttcacgatcatctgccagtaactgtccacatccagcatcgacatgccgttatccaggctggtaatcaccagcgccccgagcaacgcgccatacaccgtgcccgagccgccgcgcatcgatgtgccgccaataaagcacgcggcgatggcatccaactcgcccatgctccccgccgacggcgagccggcagccaggcgcgcagtgttgaccaacccagcgagcgcacacatcacgcccatgatgccgaagatccacagcttcaccgcctgcacgttgatgcccgacaggcgcgtggcttccatattgctgcccaccgcatacacgcggcggccgaacacggtctggctggtgacgtagctgaatacaccgagcagtaccagcaacagcagcaccggcacggggatgccgtcgtagctgttgagggtggtgacgaacccggccagcaccgcgccgatcaccaccacgcgcaacacatcacgcacccatgaatgcgccgccaggccatgcagtgcgcggttgcgccgttgtttccaggtgaggaacagggtcagggcaaacagtaagacaccgaggccgatcccgaccgaatggggcaaatacccttggcccacatacaccaaggaaggcgacaccggcgcaatggtggtaccgcccgtgatccccaggagaatcccgcgaaacgccaacatcccgcccaggccaacgataaacgacgggatacgcaggtaggccgtcatgtagccgttggccaacccgatcatcaagccgcacagggcaaccaggctcaggttcgccaacagcggcacgtgatacaccacgtccaagatcgccgccaacccgcccagcaagccgagcaacgagcccaccgacaaatcgatctcgccactgatgatcaccagcaccatgccgcacgccaggatcccggtgatcgacatctgccgcagcaggttggacaggttgcgcggcgtgaggaagccaccctcggtctgccagctgaaaaacagccagatcaccgcgacggcgatcaccagggcaagcattttgtagcgggtaaacagctgtttgagctgattcatctacgcggtcttccgatcattattattgtgttggctgagcgccgcggcgagcacctgttcctgggtgagtccctcgttgatgaagtcgccgcgcaactggccgtcgccgatcaccagcacgcggttggacacgccgagcacttcggccagttccgaggagaccatgatgatcgacaccccctcggccgccagcgcgcccatcagtttatagatctcatacttggcgcccacgtccaccccgcgtgtgggctcatcgaggatcagcacgcggggcttggccatgagcattttcgccagtacggccttttgctggttgccaccggacaggctggtgatcggcaggaacgggctggcggtcttgaggtgcaggcgcgcgatctgctggtcgatgctgcccagttcggcttcggcgtcgatgcgcgtcaggtgggcgtaggtgtcgagcaccgccaaggtgatgttctggcccacgccgaagtcgggaatgatgccctggcgcttgcggtcctcgggcaccatgcacagcccggcgcggatcgatttgagcggcgtgcgcgtgtcgatcacctggccgtccagccacacctcggcgctgtagcggccggggtaggcgccgaacagcgccgacaccagttccgtgcgcccggcgccgaccaacccggcaatgccgaggatttccccgcgcttgagcacaaaggacacatcgtccacgcgcttgcgcctggggttgtcgacgtcgtagcaggtgacgttgcgcgcttcgaaaatcacctcgcctaccgcatggggctcggtggggtagaggttgctcatctcgcggccgaccatttgggtgatgatctgcgcaatgtccatgtcggccatggcggtggtcgcgatgtgcttgccgtcgcggattaccgcaacggtgtcgcataccgccgccacttcgtcgagcttgtgcgagatgtacacgcaggccacgcccttggccttgagaccgcggatgatatccagcagcacctcgatttccgagcgggtcagggccgaggagggctcgtcgagaatcagcagccgcgcctgtttgttcagggccttggcgatttccaccagctgctggtaaccgccgccgtactgcgacaccggcagcgccacgttcatgtccggcaccttgagctcgcgcatcaaagcctcggcacggtggaacatcgccgggtagttcatgcgcccacccggcagggtcagttcatggcccatgaagatgttttcggccaccgacaggtcgggcaccagggtcagttcctggtggatgatcacgatgccggcggcctcggtttcgctgatcgactgggccttgagtggctgcccgtcccagagaatttcaccgtcccaggtgccgtggggatagaccgccgatagcaccttcatcaaggtggatttaccggccccgttctcgccgcacaggccgacgcattcccccggccgcaccttgatatcgatgccgtccagcgcgttgacctcgccaaagcgtttgacgatgccgttcatttgcagcaggtagtcggacatggcggtcactgcccggccatctgctctttggtgtagaacccgtctttctccaacaggtcgatattggccttggtcagcggggtcggggtgagcaggatggtgtcgaccttcttgctgccattgtcgtactgcgagctgtaggtgggtttttcgttacgtgccagttgcaccgagagtttggccgcttcggtggcgatcagcttgagcggcttgtacacggtcatggtctgggtgccgtcgatcacgcgcttgaccgccgcgaggtcggcgtcctggccggagatcggcaccttacccgccagtttctgcgcggccagggcctggatcgcgccgccggcggtggcgtcgttggaggcgacgatggcgtcgatcttgttgttattgcgggtcagggcattctccacgatgctcagggcctcggtggggttccattccttcacccattgctgcccgaccaccttgatatcgcccttgtcgatggccggttgaagcaccttcatctggccttcgcgcagcaccttggcgttgttgtcggtgggcgcgccgccgagcagaaagtaattgcccttgggcgccgcttgcagcacgccgctggcctgcatttcgccgactttttcgttatcgaaggagatgtaggcgtcgatgtccgcgttgaggatcaggcggtcataggacaccaccttgatcccggctttcttggcttcggcgacggcgttggtgagcacggtggcgttgaacggcacgatgacgatcacatcgacgccacgggagatcaggttttcgatctgcgagatctgtttttgctcgttggcatcggccgattgcacgaagaccttggcgtcgagtttctctgcggcggcgacgaagtagtcgcggtcgcgggaccagcgttccaggcgcaggtcatcgatggaaaaaccgatcttcgggtgggctgagtcggccatgaccggcagggcgagcagggccagggcagtggcgatgagggtgcgtttcatggttgtgcgtccttttattgttgttggaaagacagtggcgaaacgggttttttgttgtgagcggttctgttgtggcgagcgggcttgctgtggtgagcgggcttgccccgcgttggggcgcgaagcggccccttcccggcgacatgttttacctgacacaccgcggcgcctggttctggggctgcttcgcagcccaacgcggggcaagcccgctcgccacaacaagcctggtcaccacaacaagcccgctcgccacacgttcagcggtagataaagcgattcacaataccttccagcatctcctgccggccactcaccgcctgcgggttcaactcctgcgcaaaggcatgctcggccagcgactccaggctgaattcacccgccagcaccgcttggcccagcggctgctgccagccggcgtaacgctggtccttgaactgctgcaaccggtcgttttcaaccatggctgctgctcgctccagcgccagggccaacacatccatcgccgccacatgtccgtggaacaggtccacctcatcaaggctctggcggcgtaccttggaatcgaaattgtagccgccattcttgaaacccccggccttgaggatttcataggtggccagggtcatttcctcgacgctgttggggaactggtcggtgtcccagccgttctgcgggtcgccacggttggcgtcgatgctgccgaaaatccccagggacacagcagtggcgatctcatgatgaaaactgtgcccggccagggtcgcgtggttggcctcgatgttcaccttgatctcatgctccagcccgaactcatgcaggaagccgaacaccgtggcgctgtcgtaatcgtattggtgcttggtcggctcctggggcttgggctcgatcagcaggtcgccggtgaagccgatcttgtgtttgtgctccaccaccatgcgcataaagcgcccgagctgttcgcgctcgcgcttgaggtcggtgttgagcagggtttcatagccttcacgaccgccccacagcacatagttggcgcccttgagccgcagcgtcgcgttcatcgcactgaacacctgggcggcggcgtaggcaaacacctccgggtccgggttgctcgcggcgccggcggcaaagcgcgggttgctgaagcagttggcggtgccccacagcagtttgatgccggtctgttcctgatggcgttccaggtggtcgaccatctgcgcaaagtgattgcggtattccttgagcgacctgccttcgggggcgacgtcggtgtcgtgaaagctgtagtagtcgatgcccagcttggagaaaaactcgaaggccgcgtccgccttgccgatggccagttccatcgggtcgccactgcgctgccatggccgcttgaacgtgcccacgccaaacatatccgcccctggccagacgaaggtgtgccaatagcaggccgccatgcgcaggtgctcgcgcatcggtttgccgaggatgattttattggcgtcgtaatggcgaaaggcgaggggagagtcgctgctggggccttcgaagcgaaccttctcgacaccggggaagtacggcatggcgttttccttattgttcttggcggtgtctggatactagcaacggcacctggcctgctgattatgaaaatcaccaacggacagtgcgattttgcgcggcaggggctaggctgttgcgaccggccccaggacaacaacaatgaaaaccctaccgcccgtgcaccgcatcgccttgctgttcaacggcagcaaaatctacgaccgtggcatcatcgccggcatcggcaattacctgagcagcacccgcgcttcctgggacttgttcctcgaggaggacttcctgtgccgcctcaaaggtatcgagcgctggcagggcgacggcatcattgccgacttcgatgacccactgatcggcgaggcgctggccggtagcaaggtgccggtggtggcggtgggcggatcctatgaagatgcacgcgcctaccccaagggcatcccctatgtggccaccgacaacgcggccttgatgaaactggcctacgagcatctgattgaggctggagtgacgcggtttgcctgtttcagcctgcccgaagcccaggccaatcgctgggcccaggagcgcgaaaaggccttcaagcggctgctgcaacgcgatggcttgccagtgcagatctatcgcggcctgggcaccagcgcgccgctgtgggacagcgcggtggagcagcagatcgcctggctgcaaagcctgcccaagcccatcgggattattgcggtcaccgacgcgcgcgcccggcaactgctgcaagcctgtctcaccgccggcatcgcggtgccggaagaggtggcgctgatcggtatcgacaacgacccactgacccgcaccctcacgcgcgtgccgttgagttcggtgatccagggcaccgaaaccatgggccgcaccgccgccgcgctgctgcaccagatgctgcacggcaagccttgcacgggcacgcaggtgctggtgccgccggatgcgatcaacgtgcaggcctcgagcctgcaccaacccttgggcaacccttacgtgatgcaggcgctgctgtttatccgccaatacgcctgccagggcatcaagaccgcccaggtggcggcttatgtcggggtgtcgcgttcatcgctggagtcgcactttcgcaaggcgcgcgggtgcagcgtgcacgatgagatcctgcgcttcaaactcgccagcgccgccaagggcttgcagggcaaccacctggcgattgccgacatcgcccagcagtgcggcttcaagtcggcgcagtacctgcacaccgtgttccggcgcgagttcggctgcacgccacgggaataccagcacagccattagaaactttgcaggcatcgcccattcgccgctggacttgcaccgtacagactagggagaatggttttttgtggcgtaaatggaagctcccatgaccgacagtgcccagcgtgccgccagcgacatcgacctgatgaccgaagtggccatgctttattacctcgacaacatcacccaggaagccattgccaagcgcttcgacctgtcgcgggtcaaggtcagtcgcttgctcaagcgcgcccgtgatgaaggggtggtggaggtgcgggtgttgcagcatccggccctgaacacggagttggagcaggcgctggtcgagcgtttccagttggaccgcgccttgatcgcggtcgaccacggcgaccccgacacccagcgctcggccgtggccagcctggtcgccaattacctgaacaagaccctcaccgacggcatgatcgtcgccgtcggcatgggccgcaacgtgggcgccgtggccgagaacgtgttcttgccggtgacgcgcaactgcacctttgtgtgcgccatcggcggctcgctcaaggccggcgaatacatgaaccccgaccatatctgccggcgcctggccctgcgttttggcgccgagagcgaaaccctgtatgccccggccctggtggccaacccggaactgcgcagcgtgctgatcaacaacgacaccgtgcgctccaccctcgaccgtgcgcgccgcgccgatatcgccttgatcggcatcggcgacatgagcgagaacagcaacatggtgcgcatgggctggttctcaccccaggaaatcgcccaggcccgggtgtcgggtacagtcggtgacatgatgggctacgactttatcgacatccatggccaaccggcggtcaacgccatgcagggccgggtgatcggcctgtcggtacaggaactggtgcgcattcccgacgtggtggcgattgccagcgaaaacaccaaggcggcggccaccctcggtgcgttgcgctccggggtgatcaacaccctggcgacgaccgtgtcgaatgcctacacgatcctcgccctggatgatgcaacgcgtcgctaggtgacatcttgtatgtggtgagcccgcttgttgtggtgaacaggcttgttgtggcgagcgggctttctgtggtgagcgggcttgccccgcgctgggnnnnnnnnnnnnnnnnnnnnnnnnnnnnnnnnnnnnnnnnnnnnnnnnnnnnnnnnnnnnnnnnnnnnnnnnnnnncccagcgcggggcaagcccgctcaccacagaaagcgggctcaccacacaaagcaggctcacaactacgccaccaaccgcgcctcaaccgattcggccaggttggtcaggatcaggcagcacgacaccgcacccgcgtccaacacccccagggagcgttcccccaggcggctggcacggccgatcttggccaccaggtcgcgggtggaatcgcggccctgggacgcggcgctttgcatccggtgcaacgcttcgcggaacgtcgcgccgctggcctgggcctgttcaaacgcttccaccgccgggatcaaggtgtccatcaggcacttgtcacccacgccagcgtcgctgatgtcctgcagtgaggtcaggccgccgcgcagcagcctggcgaaggtcgccccgtcgatgctgtcgcggtcgcgcacttcgtcggccatgccgatgaacaggctgccatacagcgggcccatggagccgccgatgccttccatcaacgccagggtcagttcgtccagcgcttcggccagggacagttcgcggccttccagagtcttgccgcagcgcgagaaccccttggccatgttgatgccgtggtcgccgtcgccgatggcgccgtccacttcactgaggtattcgcggttggcaacgatgatcgacaccaggttggtgacaatggcgccgccggtgttgctcgggaaatgttcgcgcatgcttcactccgactgggtcatgccgatggagcggcaaggttggtcgatcaggcggctcagctcggcgtctaggccgagcagggtcagggtcacgcccatcatttccagggacgtgaagtagttgcccacgtaacaacgatgaatgcgcaggcccttggcgcgcagttggcgctcgacctcggcgtagaaaatataaagctccatcaccggcgtggcgcccaggcccgagaccagcaccaccacgctctggtcctgggtgaagtcgcggtcggccaggatcggcgcaagcatgcgctcggccatggcggcggcggactccaccggcaccacttcgatacccggttcgccatggtggccgatgcccagttccatcaggccgtcggcaatctggaagttgggtttgcctaccgccggaatggtgcagggcgtgagccccacgccgatggagcggcaatggtccacggccttctgcgccacgcggatcacgccgtcaaggtcgtagccctgggcggcggcggcaccgccgatcttccacatgaagatctcgccggccacgccacgccgcttggcgatttcggcgagcggggcggaggccacgtcgtcgttggcgaccacggtgcggatgttcatggctttgctggcggccattttcatcgccagcttcacgttcatgttgtcgccggcatagttgccatacaggcatgccacgcccgcgccctggtcggcggcacggaacgcgtcgaagaagctcttggcggtgggcgaagagaagatctcgcccaccgccaccgcatccaccagccccgggccgacatagccgagaaacgccggctcatgccccgaaccgccgccggtgacgatgcccacctggccggccggtgagagggtgcgcttgccgatgacccgtggattgctctcgtactgcaccagttccgggtgcgcgaggaggatgcccgcgagcatgtcctcgaccaccaggtccggatcattgatgactcgattcatagggtgtttccttgttcttattcgtctggaatcggtttactgaatgctgtagccgccgtcgatcaccacgttttcgccggtgatcatcttggccgcgtcgctgaccaggtagagcaccaggccggcgatttcttccggctgggcgaagcgccccaccgggatctgcaatttggcccgttcgcccagttcgcccgcccaggctttcttgcccagcgcggtttcgacgatggttggcgacacggcgttgacgttgatgccgtggggcgcccattccatagccagtaccttggtcatgccgaccacggcagccttgctcgcgcagtaggccacatgccggtccaggccgatgacggcggcctgggaggcgaggttgacgatacgcccgccgccttgctcgatcatatgctgcgcacaggcctgcgccatgaagaagctggccttgagattgatatccagggtggtgtcccaggcgttttcatctacgtccagggccttgtcgagcagggcgacccccgcgctgttgaccaggtaatcgatgcgcccgagcccggcagcggcctgatccacggcggcctgcagcgaatcgagctggcgcaggtcggccaccagccccacatgacccgcgccgaggctggcagccacttcgaccaccgccgggtcacggtccagcaacgccacccgggcgccgcgctccaccagcaactgggcacaggccaggccgataccggcggcgcccccggtgatcacggcgcaacggccggtgaggtcgaacgcctggttccagaaattggacattgcacacactccacttagcgttttttcttgcgccagacatcaatcaacaccgcaagcacgatgatcaatcccttggccacttgttggtaatacgacgacaccccgagcaggttcaaaccgttgttgatcacaccgatcagcagcgcgccaaacaacgtgccgacaatgctgccggtgccacccgacaggctggtgccgccgatcaccaccgccgcaatcgcatccagctcataagacacgcccgcctggggcagggccgaggtggtgcgcgccgccagcaccacaccggccaaccccgccagcaggccggaaatcacatacaccgagaacgtgaccttgcgcacgccgatgccggaggtgcgcgcgcttttttcgttgccgcccacggcgtacacgtagcgcccgtaggtggtgtagcgcagcaccatccagaagatcagcgcgaccaccgcaaagataatgatcggcacgccaatggggccgagcttgccgatgcccagggcgaggaagctgtccggcaggtcggtgaccgggctgccgtcgttgagaataaaggtcatgccccgcgccacgctgagcatgccgagggtggcgacaaagggcgggatgctcaggttggccaccatgaaaccgttgaccacgccaagcatggccccggcaaacatccccgcactcaccgccgccagcaggccatagccctgggtggcgaccaacgcgctgcacaaaccggcaaaggccaggatcgagcccaccgacaggtcaatgcccttggtgaggatcacgtaggtcatgcccacggccagaatgccgttgatggaggtctggcgcaggatgtccatccagttgcgccaggtcatgaagtattcgctggaaaacgccagcaccagacacagcaggataaacaccagcggcaggccgaagcggtcgagggacaagcgcaggcgattgcgcggcggggcagtgacgggtgcggcgaggactttactgttcatgaggcaagactcaacaaggcttcctgggaaagggcggtatcgctgctgacggtcaccaggcggccgcccttgaacaccgcgatgcgatcactcaggtgcagcaattccggcgcctcggacgagaccacaatggccgcaccgccggcgcgcacgaattcgtcgagcaggtgatagatctcctgcttggcgccttcgtcgatgccgcgcgtcggctcatcgcacagcaggcagatcggctgggtcgacaggcatttggcgagcaccactttctgctggttgccgccgctcatggactccaccggcaggtccagggacgaaatcttgatctgcagacgcttgaccatgctctgcgccagggcctgttccttgcgcgcattgatcaccgaccagctcgacaattgcttgtaggccgacagcgcgatgttggcgaggatgctggcgctgagcaccaggccactgtccttgcggtcttcggtgaccagggacatgccggcgcggatggtcgccgctggcgtgccgatgggcaacggctggccttgcagggtggcactgccggcgtccggcagggtcaggccatacaggcagttgaggaattcgctgcggcccgagcccatcagcccatagatgccgaggatttcgccctggcgcagttgcaggctgatgtcctggaactcgccgtcgcggctcaggccactgacatccaggcacgtggtggcagcgcattcgcggccgactttatggtcgatgcgctgcagctcctggccgacgatgccgcgcaccaggtgggcgcggtcgatatcggccatgcgcccgctttccacaaaggcgccgtcgcggaagatgctgtagtcatcggcaatctgcgccagttcactcaggcggtgcgacacatagatgattccggcgccacgcgcggtcaggcggcggatcgccttgaacagggtttgcgcttcatgttcgccgatggccgaggtgggctcgtccatgatcatcacctggcagtcatggctgaacgccttggcgatctccaccagctggatctgcgccacgctcaggcgatgcatggggctggtggcatccacgtcgaactccaggctttgcagcagttggcgggtgcgtcggttcagttccttgctgtcgacgatacaaccggcgcggcgcggttcgcggcccagccatatattttcggcgacggtcatgtaggggatgggttccagctcctgggtgatcatcgccaccccggcggcgagcgccgcgctggggcggtcgaactgcaccggctggccgttgagcaggatgctgccggcgtcacgctgggtgatgcccatcaagatgctgaggaaggtggatttgccggcgccattgccgccgcacagtgcgtgcacgctgccggcccgcagggccaggcgcccgtcgcgcagggcagggaccccggcgtaggccttggaaacttgttcagcctggagcagtaatggcggggccatcggtgtgtcctcttgctgattttcttattaggtaggcttaggcaacagcctgatcatatgatcggatagtgatcatatgtttaaactggtcgagttggttttgtcaatggcttggcgcagcattcgcctgaggttttagggttttcgcgggttgctgccttgaaataagccttgacagcagcagggctgtcgtccgctaatgattgtgcataatttcagtgagtgatcatttgatcggtctgatggagaaacagtaatgggtgcacaaacgacgttttcggtggccatcggatgcgacgaggcgggctttgagctcaaggaaatgctcaagcgctttatcgaaggcctggggtatggggtcgaggactttggctgccattcgtccagcccggtgctgtatccggacatcgcagcggcggtggccacggcggtgggggcgggtgagcagcgcctgggtgtgctgatctgtggcaccggcatcggcatggcgatttccgccaacaagatcaagggtgtgcgggcggcccaggcccacgacacctattcggccgagcgcgcccgcaagagcaacgatgcgcagatcctgtccatcggtgcacgggtgatcggccccgagctggccaagagcatcgtcaaagtgttcctggagtcggagttcgaagcggagcgctccgggaagaaagtcgagcgcatcactgcgctcgaacaggcgaacagggcgttgccgtcagacgactgagccgcttcagaacagcgccttgacctgcaggcccagcaccagggcgttgtcgatgttgtcaccggaaaacgcccccggctcgatgatgtattgcacatccgggcgcagggtcagccagggggtggcctggtagccgtagctgagttcgatcagttgttcggcgttgttcaggttggggtagtcggtcccggccttgaaggcggcctgttcctgtacctcgcggctgcgcgggttcggcacggcacggccatagcccagcgctacggtgtcccgcggccggccctcgaacggtttgtacagcaccacacctgcgccataccacttgctgaacggcgacgccgcttcgctggcggcagaatactggccgaaggcgtgtaaaacacgaccgctggaggaatccgaagcccaaaccgcctggtcgatcagcaggtagtgaccgccgcgaccgctgacttccttgttgctgccgatgcgtttcacgtcggagctgtcgtagtaataacccagcttgtattcacccggcaggctgccggtgtgtttgtagatcaattcgatcggcaccacggtgccggtggtgtgcttggggtccaggcgccaggcgcggctggagttgccgttgctttgcgggtcgacgttgaacgcggccacgcgcagttgccaggccggcgagaagtcatatttaacccgcgcacccaggcgtgcattcgggtagttggtccaaccgctgccgccggacatattcagcgggtgcccgcagaacccggcgttcatgaagttgcacagaatcccgctgtcgaggccgccgaggtcattgcccatggccatgtagccgagcttgacgttcagcgccggggtgaacagcgtgcgttcgtagctcaactcggtgaggcgagtgtagaggccgccgtagttttcctggatcggcaggcggttgcccaccaggtcctcggaggcactgttgccgcgccggtcattgatcgtgagctggatgcgatcgccattggtgaggccgtagagcttgcccaggtcgaactgcacgccgagcttgaggttctgcgagtagcgcgccgaacggtgctggccgccatgggcgttgtaggcggtttcgccactgtagtcgccgctgaagcggatgccctgtgcgtcgagttcacggcgcaggccgccccagtcgccggtcagggtggtgtcatcggcttgcacgggcagggcggcacccagggccaggcccagcagcaggcgcccaaggggaatatgagaagtgggggtcatgcgggtttttccaggcacaaggcgcggcgccggggaggcgccgcgcgaacggggggttatggcagggcgtaggcgatcacgtagtcgccacggtcggtggactggcgtgcgccaccggcggtgatgacgatgtactgcttgccggttttcggcgacacgtaggtcatcgggccgccttggctgccgacgggcaggcgggctttccagacttcatcaccgttgccgctgttgaaggcgcgcaggtagaagtcctgggtgccggcgataaagatcaggccgccctgggtcgacagggtgccgccaagggtcggcaggccgatcttgatcggcaggtgcatgcggatgcccagggggccggtgtcttccacggtgccgaccggcacttgccaggcgaccttttgcgtcttcatgtcgatcgcggtcaaggtgccgaacggcggcgcctggcacggaatgccggccaccgacaggaagcggtttttgttcaccgcatacggcgtgcccttgagcggcacagcgcccatgccggtgttcagcgcttcgccaccggacgcggcctgggccttgttctgcgacggaatcatctggatccacaggcccaggcgcatgtcgttgacgaagataaaaccgtgcaccgggtcggtggaaatgctgccccagttcatgccgcccagggagcccgggaagctcagggatttatcggtgcccggcgcggtgtacaggccgtcgtagcgcatgcccttgaagtcgatgcggcacagcaactggtcaaacggcgtggcgccccacatgtccgattcggtcagggtctgtgcgccgatctgcggcatgccgaccgattttggctgggtcgccgagtagggttcgttggggatgttggcggccttgaccgggacttccttcacctcggtcagcggcttgccggtggcacggtcgagcacgtagatctgcccggccttggtgccgatcaccaccgcaggcacagccttgtcgctgccgggcggggtgaagtcgatcaggctcggctgcatcggcaggtcgaagtcccacaggtcattgtggacggtctggtacacccatttttccgcgccggtggaggcgtccagcgccagtaccgacgcgccgtatttgtgattgagctgggtgcgctcgacaccgtagatgtcggtggacgaactgcccatcggcaggaagaccgtgttcatcagcgggtcataggacatcggcgcccagctgttcggcgtgctgcgcacgtaggtgctgccgtcggccggggcttttttgtcttgcgggttgccggggtcgaacgcccagcgcatctggccggtgatcacgtcgaagccacggatcacgccgccgggcatgtcggtctgcacgttgtcggccacacgaccgccgaccaccacggtggtgccggcgatcagcggcgccgaggacagttggtagtagctgtccggcacgttacccaggccggctttcaaatccacctggccgtgggtgccgaagtcttcgcagaactggccggtgtcggcgtccacggcgatcaggcgtgcatcgatggtgttggtcagcaagcgacgctggcactgcgcaccggcgggcacgctggcggcgatgatcggcgagctgttcggttgggtcggctgggcaatcggagcggtggcgtcgaagtaggccatgccacggcaacgctgccacaccgccgatttggcgttgacctcgttcttccacagctctttgccggtgtcggcgtcgagggcgatcaggttgttgtgtggcgtgcagatgaacactttgttgccgatctgcagcggggtgagctggtcttcggcaccgttgccgtcgctgatggcgacgtcgccggtgtggtaggtccaggccactttaagcttgttgatgttgtcacgattgatctggtccagcgcagcgaagcggctgccaccttcggtgttgccgtagtgcgcccagtctttctgctcatcggcagcggccaccggcgtgatgccagggccgttaccggtgggagcaacgcttgggtgggcaacaaacatattgcccgccgccacggccacgcccaccgccaataccgccgccacgccataggcgccgcgagcaggccggttgaccagcagcgggtacaccagcgctaccaccgtgccgatcaccgcgaacatgaacacgcgggagaacagcggccagaacaccaggcccacatccgccaccgcccagagagccgtgccgaccaggaaggccgcgaacagccacgcgcccgccggcttgcgtcgggcaatcagcaggcccgacacggccatggccgcaccgccgatcaggaagtaccaggaacctcccaggctcaccagtttgccgccgccaatggccagcgcgaggccgagcagggcgatgatcacgcccaggcccagcagtaagattctagaggcgccagcggcgcgcgatgctcgtttcatgtcgacagcactcgaatgtgagagggcaaagacgcgattttagcaagataagtaaccagttagtacattgtgcgtggtaatagactcttacggggatggtgatgatcgcgcacaacaaaaagccgcttgcccggtgtcagcggcaagcggctcttgtcagcgatcaccgaaacgccggcacgacctgctcgataaacaacgccagcgacttcttcttctcggcatgggacaggctgttgtcgcaccagaagctgaactcatccacgcccagttcctggtagtactggatgcgcgggatgatttctgcggcggtgccgatcattgcggtcttgtgcaggctctccagctcgaactcggggcgaccggcgaacttctcttccgggctgggctccaggaagccgttgaccggcacgctcttgttgccgaaccaggcatcgaaggtgcgatagaaccgggagatggccttggccccgactttccagccgtccggatcgtcctcggcgtgcacgtgggtgtggcgcagcaccatcagttgcgggcgcggtacgccagggttgttgtccagggcagcctggaatttgttcttcaggtcgaggacttcttcgtcgcccttcatcagcggcgtgaccatcacgttgcaaccgttggccacggcgaagttgtgggagtccgggtcgcgggcggcgatccacatcggcgggttgggctgctggatcggcttgggcacgctggtggaggtggggaatttccagatgtcgccgtcatgggcgtagtcgccttgccacaacgcacgtaccaccgggaccatttcgcgcagggcctggccgccgctgctggcaggcatgccgccggccatgcggtcgaattccacctggtaggcgccacgggccaggccgacttccatgcgcccgttgctgatcacgtccagcagcgcacattcaccggccacccgcagcgggtgccagaacggcgcgatgatggtgccggcgccgaggtggatggtggtggtcttggctgcgaggtaagccagcagcggcatcgggcttggcgagatggtgtattccatggcgtggtgttcgccaatccacacggtgctgaagccaccggcctcggccatcagggtcaactcggtcaggtcttcgaacaactggcggtggctgacgctttcgtcccaacgttccatgtgtacgaacagggaaaacttcatgacgcttacctcggatctattgtgatcggcctgtcgactgcaggcccttaagtgctctcgccaatctgaagcatgccggtgatgacggctgttcggcggattgattgttggtataccataatacggaatatccgcaaaacatttctctccaacggtcacaccctcacctcacaaggaaggcgagcctgatgaacataaaacaaaaattgatcctggcctttgcggtgatcgccagtctgccggtgattctggtggctgtgctgatcatcctcaacgtgcgccatgcggcgcgggacggctttgtcgacagcagcgggcgcgagatccgccaggtcgacaatgccatgcagctgtttttcgaaggcatcagccagaacgtcggctacctggcggcgcacccgcaattgcagggcatccagggcgacctcaagcgttacctggccagcgacgccgcgcaagtcacccccggcgagcgtgaccagcaactgttcacgctgttcgaagggctggccaagagtcattcggcctacacctatttatcgctgggcaccgaagacggcggttatgtgttctggcccggtgaccccaagcttgccagctacgacccgcgcactcgcccgtggtacaaggcagccatggcagagccgggcaagacccggcgtaccgaggcctattactgggcggccgacgacgtggtgctggtcagtacggtgcaaagcttcaacgaccgccagggcaaggtcagcggggtggtgaacatcgacgtgtcgctcaagcagctcaccgatctggtcaagcagatcaagctgggggagagcggttacctgatgttgatggaggccaacaacacggtgttggtggacccgaatgacccgtcccacaacttcaagaaactcggcgagttgggcgagggttatcgccagttgagcgagaccggcgaaggcctggtgcaggtcgagttggcgggggagcgctacatggcgctggtgtggccgtccaaggcgttgggctggcgctttgtcggtgtagtgcgggaaagcgaggtgatggccggtgcggcgcgcctgacctggctgatcgccgccattgccgtggtgtgtggcgtgctgtttgccatggcgggcgcgtggtttgcagggttgatcgtcaagccgattcgcggtgtggccagcggcctggaaggtatcgcccagggcgaaggtgacctgaccgcacgcctgacggtgagcggccgcgatgaaacggcgcaactggccggctggttcaaccagttcctggaagcgatccgtacgctgatccagcgcattggccaggccgccgggcagatccatacccgctccggcagtgccactgaggtctcggtggaaatggccgatgtcgccgagcgccagcgtgaagccgtggacatggtgtccacggccttccatgaaatggtcgccacttccaacgaagtcgcgcgctcctgcagccaggccgccgactcggccgacaacggccagcgccaggcccacaccgggcagcagcagatcgatgcggcggtgagcagtgtcgggcgcttgagcgaagagatcggccactctgcccaggccatggagcagttggaaaaagacagcaacgatatccagtcgatcctcggcaccatccgatccatcgccgagcagaccaacctgctggccctcaacgccgccattgaggccgcccgcgccggagagcagggccgtggctttgcggtggtggcggacgaagtacgtgccctggccaagcgcacggcggattccaccggcgagatcgacggactgctgggcaacctggcgcggcgcacgcaccagatgggcaagcagatgcacgcgagcctggaggtgtcccaggaaaccgtggtgtcgatcaatgaggcgcgggccagctttgggttgatccgtgaatcggtggatgtgatccgcgacatgaacacccagatcgccaccgccgctgaagagcagcaccaagtggccgaggatatcaatcggcacatcagccagattcacggggatgcgcagttggtggcgagcctggccgactccacgcgccaggatgcacagcagttgacggcgttgtcgcagacgttgaaccagttggtcagccgcttccgcacctgatttttgtaggagctagcaagctcgctcctacagagagtgcagtcaggccggcatgggcagggcgcccatcttgccgtggcaatacaccagtggcccggcgttctgccggggcacgatcaggttcttcacagcgcccaccatgatcgcgtggtcgccgccttcatattcacgccacaactcgcactcgatcaccgccgtggcattcgctaggatcgggttgcccagttcactcaaggtccattcgatgccctgggccttgtccttgcccttgcgcgcaaaggcgtaggcttcggtctgctgcccaccggagagcacgtggatggcaaagcgcttgttcttgatcagcaccgggtacgagtcggagctgtagttggggcaaaacagcaccagggccgggtccatcgacagcgagctgaaggcactggcggtcagcccgacgatctggccctcgtcatccagcgtggtgatcacggtgaccccggacggaaacgaacccatcacttgtttgtagatggcggcatcgatcatgggaaggtcctcagacagtgtggcggtttttatggatttgtaggtctgatggtataccgtaatacgacgcgtgcaagatctttttcagccacccgatgaacgcatgcctttggtcatatcaccaataaatacggggttttcagcgagaaacagccataagccatgtggcacaattgcagatcagatgcgtgccaggactacggatcagtcttgtgaaaatgctggaataccataatatggtgttcatctgaggggcgccatgaagcgcccccggtttggcgtcaaacaactataagatcagaccaacgcgagttcatttccatgccccagatgtcccggcaagaccccctgatcgagcatcacacggtcgattacgtccctcccgcagagcgccacggaaaggcccgcgacctgttcaccctatggttcagcaccaacattgcaccgctgcccattgtcaccggcgccatggttgcccaggtgttccatctcaacctggtgtgggggctgctggcgattgccctcgggcatctgctcggcggcatcgtgattgccctcgcatccgcccagggcccgcgcatgggtatcccgcagatggtgcagagccggggccagttcggccgctatggcgcgctgttgatcgtgttctttgccgcgctgatctacatcggcttcttcatttccaacatcgtgctggccggcaagtccatcgtcggcatcgtgccgtcggtgccggttccggcgagcatcctgatcggtgcgctcagcgccaccgccatcggcgtgatcggctaccgctttatccatagcctcaaccgcatcggcacctgggtgatgggcagcgcgctgctggccggtttcatctacatcttcgcccatgacctgccggcggacttcctcacccgtggcggcttcaatgccgctggctggttggccacggtgtcgctcggtgttatctggcagatcagtttttcgccctacaccagcgactactcacgctacctgccggcggatatcggcattacccggccgttcatcgcgacctacctgggcgcgaccctcggcaccatgttgtccttcgccttcggcctggtggcggcactggccacgcccgaaggcaccgaagccatggtcgcggtcaagcaggccacaggctggctcggcccgatcctgatggtgctgttcctgctcaacatcatcagccacaacgccttgaatctgtatggcgcggtgctatcgatcatcacctcgatccagaccttcgccagccagtggacgccgagcatcaaggtgcgcgtggtgctgtccggcgtgattctcgcgggctgctgcgtggtggcgctgggtgcgtcggcggacttcatctcgcagttcatcggcctaatcctcgcgctgctgctggtgctggtgccgtgggcgtcgatcaacctgatcgacttctacgtgatcaagcgcggggtgtacgacattgcctcgatcttccaggcggacggcggtgtttacgggcgcttcaatctgcacgcaatcgtggcgtatttcatcggcatcctcgtgcaactgccgtttgccaatacgtcgctgtacgtggggccgtgggccaacctggtggacggcgcagacctgtcgtggctggtggggttggtagtgacgtgtccgttgtattactgcttggcgacgcgccagcagacgcagcgggtcaagttggtgaacgtgggttacaccgactaatcctcgtgacggcaaaagtgcccggccatgtgccgggtatttttttgcctgcaatgttcgggtgttgcgcaggcgaaaaaaggccgccacaacccgacgttgtggcggcccaaggggtgactcagtgcgcgccggcggccttgttcagatcgctttcagcccattcggtatacacacacgcatccgccgtggcccagcgcacccgcaccgggtcgccggccttgagtggcatgccggcggcggacagtgccttgaccgtcatcgaggtgccgccgagggtttttacgctgcaggtctggctttcgccgaggaacaatacctcgccgacgatggcggacacttcgttccaaccggctgccaagggttcaaggtcagcctgcgccacgctcagcgccagggccttttccgggcgcaccatcagcagcacatcctgttcgctgcgtagcccgctggtcaggcggatcgacagcgattgtccttcgaacgacgccgccccattgccttgggccttgagcttgaggaagttggagttgcccaggaaagacgcgacaaacgcattcggcgggttctggtacaggtcgaaaccgctgcccaggccgacgatcttgccgtggctgaaaatcgcaatgcgctgggacaaacgcatggcttcttcctgatcgtgggtcacgtagacgatggtgatgcccaggcgccggtgcagctggcgcagttcgtcttgcaggtcctcacgcagctttttgtcgagggcgccgaggggttcgtccatcagcaggatgcgcggttcgtacaccagcgctcgggcgatggccacgcgttgctgctggccgccggagagttgcgaagggcggcggtgggcgaacggttccagttgcaccagcttgagcatggcgtcgacgcgcttttcacgctcggcgctggccagtttgcggatcgccagggggaaggcgatgttgtcgcgcaccgataaatgcgggaacagcgagtagcgctggaacaccatgccgatgtcacgcttgtgcggcggcacgttgaccagggattggccgcccaccaggatctcgccgctgctgggggtttcaaacccggcgagcatcgacagggtggtgcttttgcccgagccgctggagccgaggaaggtgaggaattcgccgtcctggatgtccagcgagatgttgtccacggcggcgaattcgccgtagtacttgttcaggttgcgcaggctgaccaggggttggccagggttgcgagtggggtctttgatcacggcactcatgggttaatcctcggcgttcaagcgcgggtttcagtgcgtcgacgggcgacggcggcaatcaccatgaccagcaccgacaggccgatcagcagcgtcgacgcgacggcgatcaccggcgtcaggtcctggcgcagggtggtccacattttcacgggtagggtttgcagggtcgggctggccatcatcacgctgagcaccacttcgtcccaggaaaccaggaaggcaaacagtgcaccggcgaccatgccggggcggatcgccggaaaggtcaccttgaacaccgcttgcaagcgcgacgcgccgcagatcaccgcggcatcttcaatcgactggtcgaacagcttcagtgagttgatgatcgagatgatggtgaacggcaaggcgacgatcacatggctgaccacaaacgcgaacatcgtgccggtgtagccgagcttgagaaacagcgcgtacaccgccacggcgatgatcaccagcggcacgatcatcggcagggtgaacaggccgtagagcaactcgcggccggggaagcgcccgcgcaccagggcaaacgcggtgggcaggcccagggcaacggcgaacacggtggtcagcaccgccaccttgaggctggccatggcggcgttcatccagtcggcattggagaagaactggccgtaccatttcagggtccagcccggtggcgggaacaccagccattgggatgagccgaacgacagcaacacgataaacacgatcggcagcaacaggaacaagccgatcagcccggtggtggtatagaggcccaagcgcatcctgcggctcatggcattgggagtcaggagcatgacggcttacctcgcgttgctggcgccaaccggggattccggctggagcttcaggtagaagtagaacagcaccagcgtgatgaagatcagcagcgccgcgccggcactggccaggccccaattgaggaacgattgcacctgttggatgatgaactcgggcagcatcatgttctgcgcaccgccgagcaacgccggggtaacgtagtaacccagggacatcacgaacaccatcaacccaccggaaaacagccccggccggcacagcggcaggaacacccggaagaagttggtccaggggctcgcgccgcagatcgagccggcctgcaggatcatcgggtcgatggcctgcatggtcgcctgcaacggcagcacgatgaacggaatcatgatgtagctcatgccgatcaccacgccggtgaggttgtgcaccatctccagcggctgatcgatgatgcccatggccatcaacgccttgttgattacgccggaggcctgcaacagcaccagccaggaataggtgcgggcgagcaggctggtccacatcgacagcagtacgatactcaggatccaccggccccagccacgcggcaccagggtaatgacccaggccaacggaaagcccagcagcaggctgaacagcgtcaccaggccggcaacggaaaacgtattgagcaacacccgcgcgtacgccgagttggcgaacagttgctcatagttgcccaggcctggcaccggctccagcaccccgcgcagcaacaggccgatcagcggagcgaggaagaacagacccaggaacagcagggccgggatcaggttgctcgacccccgccagcgttgcgccagggacggtgtcccgacgttgcgggaaagcgcgccggcagcgccgagggcgctcccggtcggtgtggttgccgccattttcatttgactagccattcattccaccgtgtcgcaatggccgggccgttcttggcccagtaggcgaaatcgagggtgatctggtccttggcatacgccgtcggcaggttgggcgcaaggaccgaatccaggcgctgtacgctgtcgatgttcaccggtgcataagcggtcaggttggagaagtcggcctggcccttggcgctgctggcactggccaggaacttcatcgcggcggccttgttcttggtgcctttgggcacgaccaggatgtcggccattaccaggttctgtttccagctcacgcccaccggtgcgccgtcttcctgcaaggcgtggatgcggccgttccagaactggcccatgctgacttcgccggaggccagcaactgttgcgattgcgcgccgccgccccaccagacgatgtcttgcttgatggtgtcgagtttcttgaaggcgcggtccaggtccagcgggtagagcttgtcggcggggacgccgtccgccagcagggccagttcgagcacgccggggcttggccatttgtaaagggcgcgtttgccggggtaggtcttggtgtcgaacagcgcggtccagtcctgaggcttgccggcgccgagcttgccttcgttgtagccgagtacgaaggagaagaagaacgagccgacgccgtggtcggagacaaagcgcgggtcgatcttgtcgcgctggatcaccgagaaatccaggggttcgagcagcccttcggcggcggcgcgcaaggcaaagtcggcctccacatccaccacgtcccactgcacgttgccgctctcgaccatggccttgagtttgccgtagtcagtggggccatcctggaccacggtgataccgctggctttgctgaacgggtcggcccaggcctgcttctgtgcgtcctgggtgctgccaccccaactgacgaagttgacgctttcggccgccatggcggcatgactggcggtggccagcaaacccgcgaacaggactgcgctgatacgtgtgttcaacaccatttttacgccctcattgttgtgtttatgagcggggcttttgagtgcccgcctatcgggagcagtcggtgtggatggcctttgcagggtcatccaacctgtggaatatcatattatggtattccaaactttgcgcaagcattttgccataccggccatctggccaaggtcattcaacgaacggaatactctccaccacttccaggtcgtagccggtcaagcccgcgtatttcagcggtgggccgaggtggcgcagcaggcccacgccgaggtcctggagaatttgtgcaccggtgcccacttccgagtaaatccgcgactgcgagcgattgaattggcgcggtgcctgggtcagttgcggcacgcgctccagcagcgcctgggacgactcatgattggccagcaccaccaccacgccgctgccttcagccgcgacgcgttgcaaggcggcccacaaggtccagttggacgggccgctgtagtcggcgccaaccaggtcgcgcagcgggtcgatcacatgcacgcgcaccagtgccggcgtgtcgcggcgcagctggcccatgaccatcgccatgtgcacgccgccgtcgatgcggtcttcgaaggtaatcaggcggaaggtgccgtgcaccgtgggcaggtcgcgttcgccgatacgcaccacggtgcgttcggtgctgaggcggtagtggatcaggtcggcgatggtgccgatcttgatgccgtgcttgcgcgcaaacacctccaggtccgggcggcgcgccatggtgccgtcatcgttcatcacctcgacgatcaccgaggccggggtgtgcccggccaggcgcgccaggtcgcaaccggcttcggtgtggccggcgcgggtcagcacgccgccgtccttggcgcgcaacgggaaaatatgccccggttgcacgatatcggcagggccggcgtcgagtgccacggcggccgccaccgtgcgcgcacggtcggcggcagagatcccggtggtcacgccggtggccgcttcgatggacacggtaaacgcagtgctgaacacgctgccattgctcggcaccatctgttccaggcccaggcgctggcaatgttcatcggtcagggtcaggcagatcaggccacgggcttcgcgggccatgaaactgatagtctcggcggtgcagcacgccgcaggcaacaataggtcgccttcgttttcccgatcttcgtcgtccaccaggagcaccatcttgccctggcgatagtcttcgatgatgtctgcgatgctgttgaaggacatggaggatgctcggcttgttggttgtatgtattatggtataccacaaaaattcaataagaggatgtgcgatgaaggcctactggattgcccacgtggatgtggcggatgccgagcaatacacgcaatacaccagacgtgcgccggcggcgtttgcgaagtttggcgggcggtttctggccaggggcgggcgcagtgtcgcgctggaaggcggaccggcacggcagcgcaatgtggtgattgagtttgatagctacgagcaggcggtggcgtgttatgagtctgccgaatatcaggaggcgaaggcgcaccgtgaaggggcaggggtggcgcagatcatcatcgttgaagggctggcaccctagatgatcaggccagacgttgggttaaatgtgggagggggcttgcccccgataacagtgtgtcagccactggataaggtgactgaaccaccaccatcgcgggcaagcccccgcccacattggaaccctgtttggtcgagaggtcagcggatgaagtggatcttgccgctgtcgtcattgccgatatagatgccatacaccccggcctgccgctcctcgatataacgttctaggatctgccggatcgccggatagtaaatgctgtcccagggaatctcctcaggcgcaaagaacttataatccagcgtctccggcccgaactgcccggtaatctccagcgcaatcgcgcggaagatgatgtacacctcgctgatcctgggcacgctgaagatcgagtagggcgagacgatttccgcgcgcacgccgctttcttcccagacttcccgcagcgcggcctgttcggtggtctcgccactttccatgaagccggccggcagggtccaggtgcccgggcgaggcgggattgcccgttggcacaacagatacttgccgtcctgctcgatgatgcagccggcgatgatcttggggttgatgtagtggatatagccgcagccccggcacatcaggcgctcatgggtatcgcccggtggcaactggtgaccgaggtcactgctgccgcaggtcgggcaaaagcgcgggctgggcatggtcagtggcctatgcgcggttctttgagggcgatgggcagggtgatctcgggcagcttgccggtctcttcctgtttgcgcttgaggtagtccagggccacggcagcggcggcgcgcacgtgatcgacgcaggcctggtgcgcggcaagcgggtcgccactcttgatcgcctggaccatgcgttccatttcctggttactgctggcgcggcggttttcctgggacaccgaggtggcgcgcaggtagctgatacgggcctgcaactggcgcaactgggtcgctgcgacatggttgccggagccttccagcagcacatcgtagaacccttgcaccgaatcgatgacctgttgcagttcgccgtccttgagggccttgcggttctcctccagggctttttccagggccttgatgtccttggccttggcgcgcagggtgaacagctgcacgatcaggccttcgagcacgcaacgcagttcatagatgtcgaccgcatcggccagggtgatgatcgccacctgcgggcccttggcatcggcgaattccaccaggccttcggattccaggtgacgcaaggcttcgcgcaccgaggtgcggctgacgccgaggcggtcgcacaggtcgcgctccaccaggcggtcgcccggcaacaactggaagttcatgatggcgctgcgcagtttctccagcacgatttcccgcagggtgaccgggttgtgattgaccttgaagctgtcgtcgagtggcaggcgtttcatgggggctgctctgtatgtaacggttaacagggggccgatcaggggccgaaattgtcggcgagtttatcacgcggtgtcctttaagcgacaaaccctcacggcccccagcctgcctcaggccaaggccggcaatggccccagcttgcccttgtggtagatcatcggcgtgaccggttgtgcgggcaggatcaggttcttcaccgcaccgacgatgatcgcatggtcaccaccgtcgtattcgcgccacagctcgcactcgatgatcgccgtggccttggccagcagcgggttgcccaggtcgctgaggtgccactcgatgcccttggccttttccttgcccttgccggcaaaggcgtaggcttcggcggtctggtcggcggacagcaggtggatcgcaaaacgcttgctgtcgcgcaggatcgggtaagtgtccgaggcatagttggggcagaacagcaccagcgccgggtcaatcgacagcgcactgaacgcgctggcggtgatgccgacgatgccgccgtccgggtcgagggtggtgaccaccgtgacgccggacgggaaggagctcatgacgtctttgtaaatgccgggttcgatcatggtcggggtctcttagcgcatcacaaaaggatcaggcatgggcgcctgggacaggttgatccacaccgttttcagctcggtgtaggccagtaccgaatctatgccgctctcgcgtccgtagccgctgttcttgaagccgccgatcggcgccatcgcggacacggcacggtaggtgttgacccagatgatccccgagcgcacgtcccgggccaggcgatgggcgcggccgaggtcgcgggtccagatgccggcggcgaggccgaactgcgagtcgttggcaatggccagcgcttcggcttcatccttgaagcggatcaccgaggcgaccgggccgaacacttcttcctgcatgatcttcatcgaattgcggtcgcattcgaacagcgtcggctcgtagaaccagccttcgcccaggccctgtgggcgcttgccgccggtgcgcaggcgcgcgccttcggcaattgcgtccgccaccaggccttcgaccacggcaagttgctgcgcggtggccatgggccccatttcgctggcgtcatcctgcgggttgccgatgcggatgcgctgggcacgtgccaccaggcgttcaacgaattcgtcgtagatttcgtcctgcaccaacaggcgtgaacccgatacgcaactctgcccggacgcggcataaatgccggcaatcgcgccgttgatggcgctgtccaggtccgcatcggcaaagatgatgttcggcgacttgccgcccagttccagggacagcttggcgaagttctccgcgctgctgcgcaccacatggcgcgccgtggccgcgccgccggtgaaggcgatcttgcgcaccagcgggtggcgggtgagggcggcgccggtgctcgggccgtagccggtgaccacgttgaccacgcccgccgggataccggcttcgagggccaggcgcgccagttcgaggatggtcgccgaggcgtgttccgacggtttgatcacgatggtgttgcctgcggccagcgctggcgcgagtttgatcgcagtcaggtacagcgggctgttccacggaatgatcgcggcgaccacgcccatggcttcgtgcacggtgtaggcgaacaggtccggcttgtccagcggcagggtgccgccttcgagcttgtcggccaggccggcggtgtagtggaagaactccggcaggtagctgacctggccacgggtttcgcggatcaacttgccgttgtcgcggctttccagctgggccagttgttccttgttctcggcgatcaggtcgcccaggcggcgcagcagtttgccccgtgcggtggcggtgaggccgcgccaggccgggctgtcgaaggcggtttgcgcggcctgtacggcgcgctccacatccgcttcgtcggcgtcaggcagttgcgcccagggttcggccagggccgggttgaggctgtcgaaagtcttgccggacagggcatcgacccattcaccgccgatgcacatctggaagcgtgcgagtgtcatgcaacgatcccctttattggattgttttgggcgtacacggtctctagaaaacccagcagcaactggttgaccaggcgcggcgattctaccggcatcatatgccgttgttcggccagcaccgcaacggtggcgccggggatgcgatcggccagttggcgcgccatctccggcgtcgaaccggggtcgagttcgccggtggcaaccagggtgggggcgcgcagcgtcttgaggtcgtcggcgcggtacatgtcctgggtggcaaacagctcatacgtggtgaggtaaccctggggatcattgcccgccagggtttcgcgcaaggccgcgatctgcgccgggttggccgcctggtactcgcggctgaaccagcgtgacagcgccgcctcggcgttggcgtccggcccgtgttcggcggcctgggcggtgcgcgcgatcacgccggcgcgctgttccgggctgcggttgaacacactgttgagcaccaccaggcccttgaggcgttcggggtagtgcagggcaaacgcccgtgcgaccagaccgcccatggaaaaaccgattaccgtggcctggggcacttgcagatggtcgagcagttccagcagctggtcggcataccccagcaacggcgtgccggaggccgggcgcgggctggcgccgtggccgagcatgtcgtaggtgatcacgcggtagtgcgtggccaggccaacgacttgcccgccccacatttctttattcaggcccacgccgtggatcaaaaccacaggctggccttggccggtcgccagataactggtgccagccggggtgcgttcagcggtgagccgaatcatggagcgctcctgcatgccttttcttattgggggtgccggcctggcttactgagccttttcggcagccagttcttccaggtcgatgtaacggttgccgatgcgtgggtgcaggcggccgccatcggcgcaacccagtaccacgacgatttcgtcggcacgcggggcatcttcgatgcgcatttccagggtgatgtagtgcgagcgcaggccttcgtcatccttgtgcatcatcgggacctggatggaagtgcccgggccgccgcgcttgttggtgaagctcaggtagctcttggctttgaccgcttcacggtagtgattgccgaagcgcagggtgtggatgatcgcgctggcgtgctcgatctcgccatcggcaccgaccacggcagctttgccataggcttcgatcttgtcggcaccgccaatgatgcccaccaggcgctcgaccatcagcgccccgaggtcggagcagttggcacggatttccggcttcaggtcttcgacgaaaccacggcccagccatgggtttttcagcaccacggccaggccgaccatggtcaccggggtatcagcggccttgccgccttcgatgaaggtttcttctgtgtagctgacgatcttgcggatttcgaaactcatgagcggctccatcaggtgtgggggagtgggttgcgtatgatggtataccataatacgcaaagcacaagcgtcgcgaatgagtttgcgtggggtgaggcgatagagggtggtgtatgaaggtcttttcgaggtgatgttaaaaaatgttagattgaaaaaatacttcacataatctgttcattggtggatgatcggccccaattccaatgcggctcgccggtgtggtgtcagccgccgttttcccctggagtacctatgaataataagaatgtcggtgtgatcggtttgggcgcgatggggctgggcattgcccgctcgctgttgcgcgctggtttcagtgtgcatgcctgtgatgtacgtgaggcagtcacccggcagttcgccggggaaggcggagtggcgtgctcgtcaccggcgcagatggccgaggcctgtgatgtgatcatcaccgtggtggtcaacgccgagcagaccgagactgtgctgtttggtacgggcggtgccgtggcggcgctgcgccctgcgagcctggtgatcggttgcgccaccgtggccccgacctacgccgtggacctcggccggcggctgggcgaacacgggctgctgtacctggatgcgccgatttccggcggtgcggccaaggccgccgccggtgagatgaccatgatgacctcaggcccaaaggccgcctatgccaaggctgatgcggtgctggcgggcatggccggcaaggtttatcgcctgggcgacgtccatggactcggctccaaggtcaagatcatcaaccagttgcttgccggcgtgcatatcgcggcgtctgccgaggccatggccctgggcctgcgtgaaggggtggatgccgatgccttgtacgaggtgatcacccacagcgccggcaattcctggatgttcgaaaatcgtgtgccgcacatcctcaaggccgactacacgccactgtcggcggtggatattttcgttaaggacctcggcctggtgctggataccgcccgtgccagcaagttcccactgccgctgtcggccactgcgcaccagatgttcatgcaggcctccagcgccggttttggccgcgaggacgactcggcggtgatcaagattttccccggtatcgagttgccgactgccaagcccgaaccggtgtaaggaacattttatgactgaccacaccacacgcccgttgctgggttgcattgccgacgatttcaccggtgccaccgacctggccaacatgttggtgcgcggcggcatgcgcacggtgcagagcattggcatccccagccgagaagttgcagacggcctggatgcagatgccattgtcatcgccctcaagtcgcgcaccacgccggccgcagacgctgtcgaggaatccctggccgcactggaatggctgcgcgcgcagggctgcgaacagattttcttcaagtattgctcaacgttcgactctaccgccgccggcaatataggccaggtcagtgaggccttgctcaaggcgctcgatgctgatttcaccctggcctgcccggcgttcccggaaaacggtcgcacgattttccgtggccacttgttcgtgcaggaccagttgctcaatgaatcgggtatgcagcatcacccgctgacacccatgtgcgacgctaatctggtgcgggtgctgcaaaaccagactgcattgccggttgggctcctgcggtacgacgcggtcgccgccggtgtggacgcgacacgcaccaggatcgccgaactgcgcgagcaaggcgtgggcattgccatcgccgatgcgctgtcggaccaggacctctataccctgggcagcgcctgcgccgacttgccgctgctcactggcggctcgggcctggccctgggcctgccgggcaatttccgccgcgcgggtaaattgcgcgattttgatgtgaatgcattgcccacggtcagggggggcgaggtggtgctggccggtagtgcgtcggtggcgacccttggacaagttgcagcctggtgcgaggcgggccgcccggcattacgcatcgatcccatcgccctggccgccggtgaaccggtggtggcgcgggcgctggcctttgctcgcaacagtgcgcacaccgtattgatctacgccaccagcaccccggccgaggtcaaggcggtgcagcaacaactgggcgtcgaacgtgccggcaccctggtagagaacgcattgggcgagctcgctgccggcctgcgtgagcagggagtgcgacgctttgtagtcgccggaggggaaacctccggtgcggtggtcaaggccctcggcgtcagcctgttgcagattggtgcacagatcgaccccggtgtgccggccacgctcagcagttccgccgaaccgctggcactggcactgaaatcgggcaacttcggggggcgcgagttctttgccaaggcccttgtgcacctggcaggaggtgcccaatgactggcatcgacgaacaggccctgcgcgaagagatctgcgatgtcggccatagcctgtatcaacgtggctataccgtcggcagcgccggcaatatcagtgcgcgcctggatgatggctggttgattacgcctaccgacgtctgtctggggcgtcttgcacctggggcgattgccaaggtcaacctggaaggcgagtgggtgtccggggacaaaccttcgaagaccctggccctgcaccgtcaggtgtatgaccgcaatccctcggtgggcggggtggtgcatacccattcgacctacctggtggcgttgaccctggccggggtgtggcagccagacgctattctgccgccgctcacgccctatcaagtgatgaaggtcgggcacattcctttgatcgactaccagcgtccgggctcgcccaccgtcgccgagcaagtggcgcaactggccaacagcgtgcgtggggtgatgcttgaacgactggggccggtggtctgggaaagctcggtggccaaggccagttacgccctggaagagttggaagaaaccgccaggctctggctgatgagcaacccccggcccgagccgctgagtcgggccgccttggatgaattacgcgagacgttcggcgcgcactggtaagccgtagatcgatattgcaagcctcccgcgagacccgcctgcggatcgtgacggggggcggcttgcaccaaaaaacaataacaacaggacattcccgaatgagcccactgattttgatgttgaccgccggcgcgggtatcgcgctgctgctgtttctggtcctcaagtacaaattccagccctttgtcgcactgatgctggtcagtattgtggtggcgctggtggccggggtgaaaccggctgatctggtggcgacgattgaaggtggcatgggcaagacccttggtcatatcgcgatcatcattgccttgggcgcgatgatcgggcggatcatcgagctgtccggcggcgccgaagccttggccaagtcgctgatcgagcgcttcggcaacagccgtacgccgctggctttgaccattgccggattcatcatcggcgtgccggtgttctttgaagtcggggtgattatcctgatgccgctggcctacggtgtggcacgccgggcacgcaagccgctgctggtgtttgcgctgccgatgtgtgcggcactgctcacggtacatgcgttcctgccgcctcatccgggtgcggtggcggcggccagccaactgggtgcggacctgggccgggtgctgatgttcggcctgccgatcaccgctttgctgtgttacgtcggctaccgcgtggcggcgcgcatgactcgccgcttttatccgatgaccgatgacattcgcgccgaagtctatggcccccatgtgaccaatgaagacttgcgggcctggaccagcggcagcaaccaggccgcgcaacagaacgccgtggccgaatcccacatgggcctggaggagtccaccagtgccatcgccgccaagttgcctgcggcgcctgcgccggggttcgggctgatcgtcagcctgatcctgctgccgattgtgttgattctactgggcaccctggctacatcattgcttacgatagagtcgacgttgcgcgccgtgatgaccgtgcttggcgcaccattggtggcgctgttgatcgacaccttgctgtgtgcctggctgctgggctcgcgtcggggctggagccgcagccaggtgtcggatgtcatcggctccgccttgccgggcgtggccatggtgatcctgatcgccggcgctggtggggtgttcggcaaagtgttggtggacaccgggatcggcgcagtcgtgtccgatatgttgcgcaccaccggtctgccggtgctggccctgggcttcctgttgaccatgctgctgcgcgcggtgcagggttctacgaccgtggccctggtgactaccgcaggaatcatcagcccgctgattgccaccctcaacctcacgcctaaccatatggcgctgctgtgcctggccatgggcggtggcgggctggcgatgtcccatatcaacgatgcaggctattggatcttcaccaagctggccgggctgaatgtggcagacggtctgcgtacctggacagtcatcaccacgttgctcggcaccctggggttcctgatgaccctgctgatctggccatttgtctgatttctaggagcttacatgcctcgttttgctgccaacctgagcatgctgtacccgcaatatgatttcctcgagcgcttcgctgcggcgaaagccgatggttttgatgccgtggaatacctgttcccctacgattacagcgccgccaccctcaagcagcgcttgagtgataacggtctggtccaagtgttgttcaatgcaccgccgggtgactgggcggcgggtgagcgaggcattgccaccttgccggggcgcgaggccgagtttcgcagcggcttcgaccgtgccctggaatacgccgcggtgctgggcaatacccgtgtgcatgtgatggcggggctgttgccgtcgccaagcctgcgcgaacgccatcacgccgtgtacctggagaacctggcctatgcaagcgctgcggcggccgaggttggcgtgacggtgttggtggagccgatcaacccccgtgacataccgggcttctttctcaatcgccaggaccaggcccaggcgatctgtcgtgaagtcggcgcaagcaacctcaaggtgcagttcgactgctatcactgtcagattgtcgaaggcgatgtggcgaccaagctgcgtcgtgacgtcgacggcatcggtcatatccagattgccggagtgcccgaccgccacgagccggacctgggtgagctgaactatgggttcctgttcgagctgatggaccagttgggctacaccggttgggtcggctgcgaataccggcccaaagccgatacctcggctggcctgcaatggttgcgggactggaaggcccgctgatccgaaacatcccctgcataaccggtaagcaggggggccacaataaaaacaaaaataacgggagttcccctatgcagcacttcaccgtccggcctgctccaggctggctgtttgcgttgtcttgtgtaccttcgatgctctgcgctgcaccattgccatcggcgacggagggcgattgggtcgcgcccgagttcacttttcacacgggtgaaaagctgaccaacctgaaattgcattacctgacgctgggcgatccggctcacccggcggtcctgtatctgcacggcacgtatcgacctggcagcgacgtgctgggcaaggatttcggcggtgagttgttcgggcctggccagccgctggacgccagcaagtactacattatttccaccgatggcataggggtcggccagtcgacgaaaccgtcggatgggctgcgcgccacgtttcccgcctacaactatgccgatatggtccaggcgcagtatcgactggtgaccgagggcctgggggtcaagcacctgcgcctggtcatcggtaattccatgggcggcatgcagacctggatgtggggccagacctggcctcagatgatggatggtctggtgcccatggcatcgcagcccacacagatgtcatcacgcaactggatgatgcgtcggctgctggtggagtcgatcaggcaggaccctgcgtggaatagcggcaattacacccagcagccgccttcgttacgtctggccaatgcgctattcagtgtaggcaccagtggcggcaccctggcttaccaggcggctgcgccgagcagagcgctggccgacaagctggtggacgagcgcctcaacgctgcgcaaacggctgacgccaacgactttatctaccaatggcaatcgtctgccgattacaacgctgcccccgggctgggcaatatccaggccccggtactggcgatcaattcggcggatgacgagcgcaatccgcccgaaaccggcactctggaggcgtccctgaaacacatcaaggacgcgcgtttgctgctgatcccggccagcgctgagacgcgcggccatggcactacggcgatggcgaagttctacacccgggagttggcggcgttcatgcaacacaccgagcaggtacgccaggcgcgttaacacgccgtcgggtcacgccggcgttggatcgcccggcagcatcagttcgatgccgcgcttgcggataccgtcagcggccgccggggccagggcgtcgtcgctgatgatcacatcgaacggttccagcccggcgatgcggtacatgctgaaggtgccgtacttggaactgctggccaccagtactacttgagcagctgattgcatcgccacttgcttgacctcgaccttcagcgccgagggggtggtgatgccacggtgcaggtcccaggaactggtggacacaaaagcgatatccgtgaccacctggcgcaaagtcgccaccgccagcccgccgacgcaagagtgattgtcatggtccagttggccaccggtgtggatcaccgtgacctggggcgcatccatcagggcctgcacgatcccgaaatcgttggtgaccaccgtcatccccgaaagcgccttgatataggggacgatctccagggtgctggtgccggcatccaggtacaccgtcatgtccgcgtgcagcaaacgtgctgccagtcgtgccatcgcctgcttttgtggcaattccactacggctttggattgatggctcggctcgctgtgcaactggctggcgatcctgacgcccccggtgacggagtacgcccggccttcctgttccagcagtgcaatgtcacggcgtacggtcatgtgcgagcagtcgaacatctccatcaactggtgcacgctcatcacctgatgcttgcgcaactgacgcaggatttgctcgcgacgctgctcgggaatcatcggcgtgctgctgtcgggggcagtgtccttgggggtgggcattgaggctccgggtcggtctgggggctggggcacatagtagcgaatatgcgttccgaggtgatgcacttcagtcagtcatcagtgcgtcatcgactgtgtccaggtgcttgaagcgttcgatcagaaagtcaatcaggctgcgcacccgtgccgacaggtgcagttgttgcgggtataccgcgtacacatcggcgcgggtgggggtctggtcctccagtaccaggcgcaggcgcccgctgcgcacgtagcgagcgatgtcccattcggcgcgcagtagaatcccgtagccctccagtgcccagttcagcgccacctcgccgtcgttgcagcccagggcgccgtgcactttgatgttgtccgtatgcccgccgtgggtgaacgaccacacgccatacggcgattcgttctgacggatgaagatgcagttgtgctggtgcaggtcggcgagcttttcgggtgtgccgtatttgtccaggtacagcggcgaagcgcacagcaggcggcggttggaggcgatcttgcgtgcatggaacgccgcgtccggcaggctgccgaagcggatgccgaggtcgaaaccgtgggtcgtcaagtccagcgggtgatcgctgatttccagctggatttcgacctccgggtactgcgcaaaaaacgctgccagggccgggccgatataacggcggccgaaccccagcgaggcattcacccgaatcaggcccttgggcgtggcgcgactgctgctgagcacctgctccagttcgtcgatctgggtgaggatgcgcgccgcatgggtgaaatacagctcaccttcggaagtcaggctcatcgagcgggtagtgcggttgaccaggcgaatgcccaggcgcgcctccagtgccgtcaggcgtttgctcactgccggcggagtcacccccagttcgcgcgcggtggcgaccaagctgcctttgttggcgagcaggtagaaaaacgacaaatccagggtttggctcattcgtaactcaaggttatttatgtagtgatttcgagtcgatcatgctgctttgatcgctacatatactccgatcaccccccgcttggacagcctggctgcggcgggacacaacaacaaacgtgacgaagcggagtgaatgatgagtgcatacaacattgcggcaattccaggagacggtatcggcgttgaagtgatcgccgcgggcgttgaagtcctgcaaagcctcgcgaacaaagccggctttgcaatgaacttcaagcatttcgagtggaactccgacaactacctgaaaaacggctactacatccctgaggggggcctggaagagctgaagaccttcgacgcaattttcttcggtgcagtgggggccttgaacgtgccggaccacatctccctgtggggcctgcgcctgccgatctgccaaggcttcgaccaatacgccaacgtgcgcccggcgcgggtgttgccgggggtgaaaagcccgttgcacaacggcgaccagattgattgggtggtggtacgggaaaactccgaaggcgagtactccggcaacggcgggcgggtgcatcgcggcttgcccgaagaggtggccactgaagtgtcggtgttcacccgtgccggtgtggagcgtattcatcgttttgccttcgacctggcccgcagtcgcccccgcaagcatctgaccctggtcaccaagtccaatgcccagcgtcacggcatggtgctgtgggatgagattttctacgaagtggccaaggacttcccggatgtgaaaatcgacaaggaactggtcgacgccgtgaccacgcgcatggtgctcaaaccgtcgaccctggatgtgattgtggccaccaacctgcacgctgacatcctttccgacctcgccgccgcactgtccggcagcctgggtattgcgcccacggccaacctcaacccttcgcgccggttcccgtcgatgttcgagccgatccatggttcggcgttcgacatcaccggtaaaggcgtggccaaccccatcgcgacattctggaccgccgccatgatgctcgaacacctgggcgagccagccgccgcccggcaattgatgtcagccatcgaggcggtcaccgaaagcggcctgcacacccctgacctgggtggcactgccagcacccgccagatcaccgatgccgtcatcgagctgatcaaccgctgattcacgggagtactgcggcacaacgccaagggccggcggtcacgtccgcccccctggcatttcctgacaacaataagaatcagggccctgtcatgaaaagaatatttggcaaactctatgtgcaagtcctcatcgcagtcatcctcggtgcgattgtcggggtgcttgtgcccgacaccgggaccgcgctcaagccattgggcgatgcatttatcaaactgatcaagatgctcctggcaccggtgatcttccttacggtggtcaccggcattgccaagatggagaacatgaaagagctgggccgcgtgggttttcgcgcgttgatctacttcgaagtggtatccaccctggccctggtggtcgggctggtggtggtggatgtgttcaagcccggcgccggcatgaacatcgatgtggccaccctcgacacctcaagccttgccacctacaccacggcggtcaagcacgcctcgttcatggactttgtcatgaacatcattcccgacaccctggtggatgcgtttgccaagggcaatgtgctgcaaatcctgctgttttctatcctgctgggcgttgcgctggctgctgtggggccgcgcggtaagccattcgtggacacgctggacagcctcatgcagggcatgtttcgtatcgtcaacatggtcatgcgcctggcgcctatcggtgcgtttggcgccatcgcgttcaccatcggcaagtacggcttcggttcgttgttttccctcggcaaactgatggcctgtgtctacctgacgtgcgcggtgtttgtgatcttcgtgctggggccgatttgccgctacagcggcttcagtttgtggaagttcctcaagttcatcaaggaagagctgttcaccgtgctcggcaccagctcgtcggagtcggtattgccgcaaatgattgccaagatggagagggccggggtgtccaaaccggtggccggcatgatcatcccctcgggcctgaccttcaaccccgacggccaggcgatctactacaccatcgccgcgattttcatcgcccaggccaccaacacaccgttgaacctaactgatcagttgatcgtgctggcggtgttgatgttcacctcaaagggctcggcgggagtgaccggctcaggctttattatcctggcggcaacgctgtcgtcactgggcactattccggtggcgggcatggtgctgctattgggggtagaccgttttatgtcggaagcgcgggcgatcaccaacaccatcggcaatggcgtgggcaccatggcgatcgccaagtgggtgggggcgttggatacggtgaaaatgcgcaaggccctcgacggtgaagttgagagcccaggtgcacattcagaacttgaatcgccccaccagccccttgagctgcccggaaatatccgtcaaccgacctgacccggtctgcgccgaatgggcaaacccttcgaccagttgcgcatcggcatggatttgcgcgatgtgccggttgatctcttcggccacctggtgctgttcttcggcggcggtggcgatctgggtgttctggtcgcggatcgagtccaccgagccacggatcttgtcgaagctgtcgcgggcctgctggatgcgttccacgctggtgtgcgacaccagcaggctgccttgcatctgctgggtcacttcctgggtgcgacgggcgaggttgccgagcaggctgtcgatctcgccggtggagtcggcggtgcgacgggccagggcgcggacttcgtcggcgactaccgcaaagccgcggccctggtcaccggcacgggcggcctcgatggcggcgttgagcgccagcaggttggtctgttcggcaatcgagcggatggtgtcgaggatggtgttgatgtttttgctgtcctgctccagctgctgcatggtctgggtcgagcgttgcaggtcttcgctgagctggagcacgctgccggtggcttcgccgatgtgctgctggccgtcgtgcacatcgcggtagccttcatcggcactggtggcggcggcgctgcaggagcgcgcgacttcgttggcggtggccaccatttcgttgaacgcggtgctgaccagttccaccgcttcacgctggcgaccggcggcctggttcatgttgtgggcgacttcgctggtatcggcggcggcggtttgcaggtcggacgaagcgttgccgatgcgctgcaccaactgggcgatcatgctcaggaactgattgaaccagccggccaggctggcggtttcgtccttgccctgcaccttgagctggcgggtcaggtcgccttcaccttcggcgatctcttgcaggccgtcggccacgccgcgaatcggacgtacgatcacgctggcgaaactggcgccgacaatcgcgaagaccacggccagcgcagcggcaatcgcagcgatcaaccaggtaaggcgggtcgcgccggccatcacttcgtcgcgcttgatcaggccgataaagcgccagcccaggtctttggagctgaccatgttggccatgtaggccacgccatcgatgtcgatctggctcacgccgtcgccgcgcttggccagttcggcgtagttggggccaaggtcggccaggggcttgaagttgtgcttggcgtcgctggggtctaccagcacgttgccgttgccttccaccagcatcaggtagccgctgtcgccgagcttgatgttgcgcaccagttcggtgagctgcttgagcgagacgtccaggccgaccacgccgaggatcttgccggcggcgtcggtgacggtgtgcacggtgccgatcagcgtcacatcgtccggcgcccaatagtaggcgccggtgcgcacggttttacccggcgcggcgatggccgcctggtaccacgggcgtacgcgtgggtcgtagttgttcagcttggtgtcgtcgggccagctggcgtagccgccgtcggcgaggcccagggacaggtaggcggtgctcggatggctcttggcgaactggtcgaaaatctccagcagcgcggtgttggtgggggtgagggggatctgtgcggcgtcggcgccggcgtagctcttgaggtccttggccgcgacaacgcgcgggtccttggccacatactcgacgttctggctgatgccctcgaagaactgcttcatgccattgtcgatctggcggatctcacggccactgctgtcgaggaaattggcctgggccccctcgcgcagattcaacacgaccagcacggccaccaggataaccggcacgcacgcgatggcggcaaatgcccaggtcagcttttgcttgatattcatgacttcacccgcgggtatttataattttggcaaggagaaaacagtagcgtcgagcgtcgcatgtgttgtttttagggggtgtggccatgcgtaccccctgtatatcgactgcgcgggcacgcacttgagggccgagagaaggtttaaccgatgcgttcgccacccagcgcatcacgctgcatcgactgcaggtttttctcgatggtttcgcagatggtgtccatctggatctggtgttcgctggagttgaacgggctttgcaggtcggtgccgatgcgctcgatggccagcagcatgaaacccaccaccgtcgaggccagcggggtgaaccagcccagggactccaccaggcccaccggtacgatcaggcagaacagcgagataaacagccgtgggaagtacacgtaagggtagggcagcggggtgttggcgatccgttccatgccgccctgggcgttggacaagtccaccagggtcgactccagccgtgccaggcgaatgctgtcaaggtgaccgaccttgtactcgcgggccagcaacgccgctgaaccggtaaggatatcgttggcaaagttgttggtggcgccgttgcgcgcaaactcgtcaccagggataaacgcgcggacttcttcggggcaaggctggcccttgaggtgcgcggccaggcaattcacataggccacatgacgacgcagcagggtggccttgaccgggttcacttcgtcgtcggggtcgtccagcagggtcagtacctggcgcgcaaaactgcgcgagttgttgaccatcgcgccccacagtgtgcgggcttcccaccagcggttgtaggcactgctgttacggaaactgatcagcaccaccagcgccgaacccagcagggtcaggggcatcagcggcagattgatcttgtaggtgagaaacaacatgaagtccacggtgacggcgacgtcccacagcagcagccagaacagcgcccagccaacgtagcccatggtcttgatgatcaggcggtactttttgaggatggcggctttcaaacggggacctcgcggcgaacggtaagcaagagtgcttaagctcggacgcgggtggcggtgaaaggttcgccccatggcctgaatcgtttaagtggtgcgcaccggctcccgtgagagtcttcgcagttcttccagtgccgccaggattcaatggcatcggcgaacaggtcgattgaacagtttcatcacaacgcttggatatatttaaaggcagcgaagcaccgcagctgtcatgggcgtgtatgagtgggttgctttagggacgccaatacgttttggaacaattttggtagcgatgatgtctgtcgggttactcgcgatacattgcgctcgaggcaaaacgccatcactggtggtgtttacgacgtgagttgttgtgagacctggttgcagaagtgctgcgccatcgatcagtgaattccagtaggttgatcagggctctttctcatgtgcgtcagttcgttgaagtgggcgttggatcattccgcgcaggtgttggaacgtcacggggaatttgaatgcagtattcgcgcgcactacgccattctgctgggtccctattcaaaacgaccgtttttctacaagacagcgctgaagttcaaccgtttgatggtgtctttcacgctgctgagtgaatatttctccaagcccgcgccattgttgtccgacgtgaaagcgttctgcgtggctcgcggtttctgttccaggaacagcctggagtcgatcttcctgctgttcagggccctggggttcatgaaggtcgctggccaccctgacgacagccgttttcgggtgttcagcccatcgccgcaggcttgccatgaagtcaggtcgatgctcaattccgtggtgcagccgctgggaccaatgtgccccagtgaagcgcaggtccagcggatgagtgagttggacgaccgagccttcctggcactttatttcaaaggttttgccacccttctttcaaataagctgaccatcgatgtattgctgccggaatgtgactggctggttaaccgtgatgccggacatatgctgatgttggcgatttataacgatgcctgttccttggactgtcagggcgcaagtttcaggacgtcttcttatctttcactggcgacgcgactttcagtgtccaagacccatgtgattcgtctggttcaggagggtgttgaaaaaggttgctttaaagtgcattccaagacgcagttggaagtattgccgccctttgtaaagttggtgcgccgtttcatggcgtattcatttgcaatcaccctgcttagtatcgagttgggccaagccaggaaaatataggcaacttatgcgcagggagtgttgagatgccggctgacttaaagctcaggccaaggatgcagaggttattgtcgcccgctgttgcccaggcggaatggataggcctgattgcctggtggtgggtgctcttggtggatccggtgctggagttcgggtggtacaccgtgctcattaccgtctgtttgacagcgttgtgtcgatttcaccggcggttggccaatttcctggcctggcgggcgttcggtgtggtctatatggcggtgttggccgggggctttgcgttggtgatgcagaccgatcaggcgttgcaggtatttgctctaccgctggcggtgattctggtgctgagcagtgccttgctctttatcgcagtccaggatttcttgataggcgctgcattgatctggtcgatgctgtggccagctgttcatatgtcgatctacgccggggttgaggtttacctggtgatgttctgcctggcgtcggtgtcgatcggcttcatcttgaattattcctacttgaagaacctgcgttccgtattgctggtcgagagtgagttccgggaactggcagaaacggattacctgacctccatcctgaaccgacgggcctttatcgagcgtttcgcccaagtgatcgccgacggccagggcggctacttcatgatgttggatatcgatagcttcaagctgaaaaatgaccagtttggccatgatgtcggcgacaagattctctgtgcgatggctcattgcctgaaagccactcctggcagcgacagcttcggtaggatcgggggagaggagttcggtgtcttgctggtgggtgatgacccttgggcggccacggattttgccgcgcgcctgctgcaagccattcgtggcagtgtcccgccaccccatcactacacgtgcagtgccggcatgacgcatttctcggcgggcgccgatatgtcagcggtactcaagtgcgccgaccgcaacctgtacgccgccaagcgcaatggcaaggactgcgtgtacctggatggcgagccggtggctgcttcccggtgaaacgcaaagacgggcctcagtgctgggccagaatgctcgcaagcaagccgggaaagcggccttcaagatcttccgcacgcaacgcattcagatgagtggtgcccacgctgcgtgtctgcaccaacccggcatcgcgcaacacccgaaagtgatgggacatgctcgacttgggccgcccgccgtccagttcgccgcaggtggcctctggcacgccggccaggcagcgcacgatttccaggcgcaccgggtcactcagggcgtacagcacgcgctcaagggtcaggtcttgcaggggggggtgtttgaaggctcgcatgaaacgaatcataacagggggctatcgttgaataccatagttcgattaccatcgaactatcgaatcaaccacctgctcactggagtcgcctcatggccgcattgttcgaaccgttccaactaaaagatgtcaccctgcgcaatcgcatcgctatcccgccgatgtgccaatacatggccgatgacggcatcgtcaacgactggcacctcgtgcacctggccagcatggcccgtggcggcgccggcctggtggtggtcgaagccactgctgtcgcgccggaaggtcgtatcactcccggctgcgcgggcttgtggagtgatgcgcatgcccaggcgttcgtgccgatggtccaggcgatcaaggccgctggttccgtgccgggcatccagatcggccacgccggccgcaaggccagcgccaaccgtccgtgggaaggggatgaccatatcgccgcttccgatgcccgcagttgggaaaccattgcaccgtcggctatcgccttcggcgccaacctgccacaggtgcctcgcgccatgaccctggacgacattgcccgggtgcgccaggacttcgtcgacgccgcccgccgcgcccgcgacgccggttttgaatggatcgagctgcacttcgcacacggctacctcggccagagtttcttctccgaacactccaaccagcgcaccgatgcctacggcggcagcttcgacaaccgcagccggttccttctggaaaccctggccgacgtgcgtgaagtctggccggaaaacctgccgctcaccgcacgtttcggcgtgatcgagtacgacggccgcgacgagcagaccctcaccgaatccatcgaactggcccgccgtttcaaggccggtggcctggacctgctgagcgtcagcgtcggtttcaccatccccgacacccacatcccgtggggcccggcgttcatggggccgattgccgagcgtgtacgtcgcgaagctggtatcccggtcacgtcagcgtggggcttcggcacgccgcaactggcggaaggtgcgttgcaggccgggcacctggacctggtgtcggtggggcgtgcgcacctggccgacccgcattgggcgtattttgcggcgaaggaactgggggtcgagaagtcctcgtggaccttgcctgcgccttacgcgcattggttggaacgttatcgctgaggcggtagccggatgatggaagccactcccaggagtggctttttttttgcgtcgtcttttgtagcacgtcgatacatggcggatactcaaaaaaacatcaatgagaatggatatcaattgttaatgatttgacatatcatgcgcgccaaaataactggctgatatgccgccccatctggctctttcactaggttcaactcatgcgtcgtaccctgctttccgtgtgtgtgcttcaggcgttttcccccttgagctgggcggaggtcgaaccggttgaaaaagccgccatcgagctgcaagccaccagcgtcaccggcacggccgactatgaaaccgcccagggccccgtgcagggctatcacgccacccgttcagcgagtgcgacgcgcaccgacacctcgatccatgaaaccccgcagtccatcagcgtagtgtccaaggcggtggtcgaagacatcggcgccactcgcctgcaggacgcgctggactatgccggcggtgtcggccgcgccaacaacttcggcgggcagggtctcactaccttcaccgtgcgcggctttaccaccggcgagttctaccgcaacggtttcccgatcaaccgtggctacccgaacatgccggatgccaacaccatcgaacgcctggaagtgctgcgcggcccagcgaccatgctctatggccgtggtgatcccggcggcaccttcaacgtggtgaccaagcaaccgttggccgaacgcacggtcaccctcggcagccaattgaatgaccagggcatgaagcgcggcaccctggacgcctccggcccgttggacgaagagggccgcctggcctatcgcctgaacgtggtgggcgagggcggcgacaccttccgcgaccatgtggaaaccgaacgctacggcatcaccccggtgcttacctggcaggccagcgacgacaccaaggtgatcttcgaaggcgacttcatgcgcaacaaccacccgctggaccgggggctgacacgctttgctactcagaaaggcacggcttcccgcgataccttctggggcgataaagacgtcggcaagctgcataacgacaacagcatggcccagttgcgtttcgagcatctgctcaatgacaactggaccctgggcggtggtttccagtggttggacggcaccttgcagggcaacgccatcgaggccaacagcctggctgccgatggccacacgctcaaccgcaacttcaactaccgcaagctggaatggaccgacaaggacacccagctcaacctcaccgggcatttttccacgggtggttttgatcacaccttgctgactggcgtcgagtttgaggattacgactacaagtcgatcatccagcgttcgtccgccgcctacaccagcgatatcttcaacccggtctacggcaagccgcgcccggcgcttaccagcacgccgactcatgacaaggaaaacctcaagacctacgccgcgttcgtccaggaccaggtggccctcaccgaacgcttgaaggtgctggcgggtgcgcgcttcgaacgcttcgagcaccagtacgagacctacgtgaagggcgggcaaagctgggaggccagcgacaacgcggtcacgccccgtgtcggcgtgacctatgacctgactgagaccctggcggtctacgccgacgccgcgcgttccttcaagccgaacaccggcgccagtcgcgacggtgccggtttcgagccggaaaagggcaagtcctatgaaatggggatcaaatgggaagggctggaccgtcagttgagtgtggacgcagcgatctaccagatcgacaagaagaacgtgttgaccaccgatcctgaagactccaactacaaagtcgcagcgggtcaagtgcgcagccgcggcttcgacctcaacgtcgccggcaacctcacccctgaatggcgcgtgatcggcggctacgcctatgtcgacgccgaagtcaccaaagacaacaccatccgcgtcggttcacacctggccaacatcccgcgtaacagcttcagcctgctcaacgtctacgaattccaggacggtcgcctcaaggggctcgggctgggcgcgggcgccaaatacgtcgatgaacgtgtcggccagacctccaacaccgccttctccatggacgcctacaccgtggtagacctgctgggctactacaaggtcaatgacaaggtgcgcctgaacctggatgtgaagaacctgttcaaccgcgattttgaggaaggcgcgttcggcaacttctacgcctacccaggcgcgccacgcacggtgcaggtgggcatcgcctacaccctgtaaaaccggggcggtgtgcaatccctctgggtgattgcacaccgtattcctcagccctcgaacactgggtgcgacgacctttcaatcgccaccatggcatcggcctggctcatcaaccccgactcttccagaatcgacaacagcgagcgcccttgcgccaccgattggcgtgccagcttgctcacacgggcgtagcctagctgcggaaccagcgcggtggccacggccattgattgagccaggtgttgttcgttacgttcggcatcggcggttatcccactgatgcacttctcgcgaaaccgttggatgccttgggtcagcagcgcaatgctgtcgaacacgcgggacgccaccagcggctcgaagtggttgatctccaactgaccggcctggaccgcctgcgccaccgccacatcattgccgatgacggcgaagctcaactggatcatcgccatgggcaacaccgggttgaccttgcctggcatgatcgacgagccggcctgggcttcgggcagcttcaattcgccgatcccaccgaccggcccggaggacagcaaggtcaggtcagttgcgatcttggccagggacgcggaaccggtgcgcaactcagccgaaacccgagaaaacacatccatgttctgcatcgcatcgaaggcgttcgaggggggctggtactcaatgccagtgacctgtaccaagtgctgatacaccgcggcgcgataagcgggaggcgcaccaaacccggtgccgatcgctgtgccgcccagcggcagggtgcgcagtgtgtcgcgcacgccagccagcgcggtcgccaggcgatgggtgagggcagcgtacccggaaaacagctggcccaggcgcatcggctgggcatcctgcaggcaggtgcggcccaggtgcagaatatcggcaaactgcacggctttctggtcgaagcgcgtagccagttgttccacttcatcgatcaatggcccgagcatcgcatgtgtcgcgatcttcaatgccgcagggtacacatcattggtcgactgcgaggcattcacatggtcattggggtgcaccacgtcatacgaacccgccgcgtggcccatcaattgctgggcgcggttggcgatgacctcattgaagttcatgttggtggacgtgccgccggacccttccagcaggtcaacgatcagcgagtcgtcgcaccggccggcgatcacttcggcgcaggcttgcacgatggcgtcgcactggggctgggcaagtacgccgcaggcgcggttggccagtgcggccgcccacttgcactgggcaaaggcatcgcggaaggccgggtaataagcgatggtcagcggtgatacgctgaggttgtcgaacccgcgcaccgagttcaccccgtacagcttgtctgccggaatctgtacgtcgccgacgtaatcggtttccagccgtgtagcaacagcatcaaaaatactcacgagcatcaccctcatcaaattggattaacgcctccacccctttgtccagggccgtgagcctgggcaggaaggagtggcggatcacatcacgcgccgtttcgcacgcatcggcgaaaaaggcgctgtattcattgcgtcgtgctaccaggtaaagcgagcgttccagttgcaggtccggtgtgaggtgcgcggtcacgttgtcgacccaggcactggcctgcaaaaaacacatggggctggtaacggcccaaccgatgccttcggcgaccatcgacgtcagtgcatcggcgttatccagctccaggcggttgggcactcgtacgttcaggctgcgcagatgacgctcgatctgcagccccacctgggacatccggttgaagcgcaccaccggcagcacattggccagcgcgcgtacgtcctcgaccgtgtggatatcgcagcgcgcttgcctgggcgtgataacaaagtacttttctgaaaacagccgatagcgaatcacgtcattggcgtccatcaacgggtcgctggtgacgatcaggtccaggtcgcgccgcaacagggattcaccttgttgcgggctgagccctgtgcgaatggacaactgcgcgaccttgccgagcaattgccgggtgaacaccgacccgcaggtggcggcgaaggagtccaccaggccgatgcgcaggtcggggttcacaccgcgcccggcgtcgatcacttgtgccttgaggtgggacagttcctcgctcaacaccgagccccgattgcgcagggcaaccccgaatgcggtgagggccatgggccgggtggtgcggtccaccagcaccacccccagttcctcctccaattgacgcaccatctgtgacacgccggactgggaaatacccatgcgcgcggcggccccggacatgctgccttcctcggcaaccgcgatgaacacctggactgcatacatgtcgatcagcctgttcgcagacatcctcaacctcacttgatggtgttattcaatggcaaccttggcgtccgtccgaagaggatcgggcgtgacccccgacaagtcttccttgctggtttctggcgcaaacacgtggcagaacacgccgccgaagaccagcacgccaacgcatacgcccaacgccgcatggacccccacgtgctgcaccgcgactggcagcaggaacgtcgccaccgccgagccgaaccggctggccgccacggccaggccgatccccgaggcccgcagatgggtggggaacaattcgggtgggtagacgaactccaggttgaccgccgccgccatcacacaggcaaaaacgccgaaggcgaggatggtgcccagggggccgaaaccggcgtaggccaatactgccaggcccgcagcactcaagtagaaggtgccgaccaggaatacgcgccgggacagccgatcaatgaccagcagaccgagcagtgcgccgagcaatagcaacacgttgtagaccaggccaccggcaaacttgtcctgcacgttcagggcttccaggactttgggtgcgaatgtgccgagggcgaagaacggaatcacctggcaggtgtagaacacgcaacccaccagcgtatttttgcgccagcgcgggctgaacagttctgcccagctgccacgctgcttgtgcccattggccggggccacgggtgctggcaggaacacatgcgggccgaacttgctgcgcacaatggccatggcttcctggctacgcccgcgagccatcaaccagatcggcgattccggcacgcccatgcgcaagggcagaatcaacagggctgggacgccgctgagggccagcatcacgcgccaggcatccgggccgatatcgcggatggcaaagcccaccagatacgccgccacatagcccgccgcccaagctgccgctagcacactgagcaggcgtccccgatagcggcgcggggcaaattcggtcaccagtgacttgctcacgacatagtcgaagcccagcaccagccccagcagcaaacgcagcgccagcaactgctcgggcgaggtgacaaagaactgcgacgcagagatgacggcgaacaacagcatgtcccaggcgaagattgcccgccggccgaacttgtccgcgataggcccggccaacaggctgccaaggaacagtcccgccaaggacgcggcgcccagcaagcccatccataatgccgtcaactgtaacgggccggccgccatgctgacggcgatcccgataatgcccagtacgaaaccatcactgaactggccacccgtgccgctgaataccgtgcggatatggaagcggctcagcggaaggtcttcgaacgctacttgaccactcattcgtctctccacttgcgtttttatagttgtgggaaccggtgcatcggcaccggctgagagcgagtctagggcgacagcttcacgaaatcagcaggtgccctgtgagtatcaagatagctgatactgagggccgcttttcttgaacaggggacaaagatatgagcgagtacgcgcaactgactcacgagcttgaacaggcacaaagtaggacccacatcacagctgcgacagatggcggccaataagcatttacgtccacccccaatcgatgagaaaagcacgtccattccctcggatatggacatcgcatgcctcgttcaaccctcatcgttcgtgtattcgtcgcgctgctggccagtcttgcgctcgggtatatctggatcatcgtcagcgccaagctggaaatcggcggcgccagcccgaatcaacaacggctgggcacactgccgggcgtgcggccacacgcggtcagccaggattgcaccggagtgaaggtgaccgcccagggcacgtggctggtggggcgggtgacgaatgaatatgaacagctggaaccctcaagcgagcgggtggacttgaatggcttgctcgacggcgaactgcgttcggagccggagaccaccgtggttgcgcgtctgggggctgacggggtgttcaagcaggtcgcccaggtcagcggctcggcctgcctggtggcgagtgcggagggcgcgcgcgtgtttctgctgagttcgctctatcgacccaacgatgtggggggccagaacgcggtgttccgcagtgatgaccagggcaagacctggcgctgggtggccgacgggtttttccccgaggtgagcggtgtggccaccctggtttcgccgtacttctataatcaggacgaggtctgggcctcgcgttgggccgatgacgtcgagccgcaggccggggtgtattactccgccgacggtggcgcccacagcacgccgatcacggtgccacaaccgctggcggtgacccaagactacgcccacagcctgcgcccggatatccaggagtggcgcgattcaaccgaacagctgacccacgtattgcaacaggatgcgcagcacgcggtgatctgggtgtcgcaacgcttctggggcagccatcccgatggcaagagcgacaacctggcgatcggtgtcaccactcgcgtgcagttgaagcgcacggccggcacgtggcaagtcgaggatattcagcgggaaaacggcctgtacatcagcgagcttgcggacaacggcgccgggcgcgtgatcggcctgatcgaccaggggccccatgggcgcgcggtggtcgccgaattgaacaccgcgacgctggcctggaaaacggtgggcgacttgcccagtgtgttctcgcccttgagtgccgatacccaggcgcgtgggctatgggtagggcgcaacagcctggtggtcaatacctacagcgatcataagccgccgcgttggctgtactggtggagcgaggcgagtatctccgccgatgcggtgttctattcgacggactggggccattcctggaagcgtctgtcgctggacgggtacatgggcgtgcgcgggtttgacggtgccagtgatcgggtgttctggagcaaacagaattacgccgacgacaccctcattcaagcctatggcctgcgctgaatcgcctacaacggcgtcaacacgttcatcaccgtatccaacgccacccgcgtgtcatccagttgcaccagcgacgcatgccgcgcgccgagggcgtcgcggttctggatcgcggtgaggatcgccttgtgccggggcaggctcaggccctggatgtcggggcggcggttggtgatgttgatcgactcgcgcaacggcagcgacagcatgttgcacatgtaggcgagcaagtcgttgcgcgtggcgtcggcgatggcgcggtggaagtccaggtcggcctgcagcagctgttcgtgggtctgcgcggtttccatgccctggtaggctttttcgatggtggcgatgtcttcgtcggtggcggtggtcgcggccatggcggcgatctccggttcgaggatgcgccgcacaccggccagggtgttgaagaactcactgtggggtgtggactgcatcaaccaggacaacacgtccgggtctagcaggtgccacttcacgcgaggccgcaccaccgcgcccacccgtggcttggaatacaccaggcccttggcgctgagcacccgcgtggcttcgcgcaacaccgagcggctgacctggtactcctcgcagagcgtggcctccatgggcagccgttcttcgggcttgaagcggccggaaacgatgtgcatgcccaagtcctgaacgatctgggcatgctggctcttgcgcggcttgggcggctggtgatccatgacgacggggaggctctggcttaaagacgcggcatcatagcatcccaattagtgggaatgccgtgggacttccgccccacggcaacccaccaggaagtcaaagtcgcagccctggtcggcctgcagcacatggtcgatgtacagctggcggtagccgccgacgatgaggttctgcggaggcgccaggtctgccatgcgcgccgccagctctgcgtcggggatgtccagatgcaggcggccgttggcgcagtccagttcgatccagtcgccttcccgcaccgtggccaacggaccgccggcagcggcttccggtgccacgtgcaacaccaccgtgccgtacgccgtgccgctcatgcgtgcatcggagatccgcaccatatcggtcacaccctgggccagcagcttggccggcaggcccatgttgccgacctcggccatgcccgggtagcccttgggcccgcagtttttcatgaccaggatcgagttggcgtccacgtccagttccgggtcgttgatgcgcgccttgtacatgtcgaagttctcgaacaccaccgcacggccacggtgctgcatcagctctgggctggcggcggacggcttgagcaccgcgcccagcggggcgaggttgccgcgcagcacgcagatgccgccgtcggcgcggatcgggttgtcgagggtgcggatcacttcgtcctggccgtagatcggtgagtcctgggtgttctcgcccagggtcttgccgttgacggtcagggcattcggatgcgggatcaggttggcttcacccaggcggcgcagcaccgcgggcaggccgccggcgtagtagaactcttccatcaggaagcgccccgagggttgcaggtcgacgatggtcggcatgccacggcccatgcgggtccagtcgtcgaggtcgagttcgacgccgatgcgcccggcgatggccttgagatggatcactgcattggtcgagccgccgatggccgcgttgacgcggatcgcgttttcaaacgcctctttggtgaggatcttcgacagcttcaagtcttcgcgcaccatctccacggcacgcatgccggacatgtgcgccagcacataacgccgcgcatccaccgccgggatcgccgcgttgtggggcagggacgtgcccagcgcctcggccatgcaggccatggtcgatgcggtgcccatggtgttgcaggtgcccgccgagcgcgacatgccgccctcggccgcgaggaagtcatccagggtgatggtgccagctttcacctgttcgctgagctgccacaccacggtgcccgagccgatgtcctggcccttgtgcttgccgttgagcatcggcccgccggtgaccacgatggccggcacgtcgcaactggcggcgcccatcagcagggccggggtggttttgtcgcagccggtcagcagtaccacgccgtcaatcgggttgccgcgaatcgcctcttccacgtccatgctcgccaggttgcgggtgagcatggcggtggggcgcaggttggattcgccattggagaacaccgggaactccaccgggaagccgccggcctcgattacgccgcgtttgacgtgctcggcgatctggcggaaatgcgcgttgcacggggtcagctccgaccaggtattgcagatgccgatgatcggcttgccatggaactgatggtcggcaatgccttggttcttcatccagctgcggtacatgaagccgttcttgtcggcggtaccgaaccactgggcggagcggaggccgggctttttatcaggcatgatcgattctcttattgtatgactatatgttctatgcgtgcttaaacataagcgcaaaaacgctgctttggaagagttgttttgcaaatagtcatactatatagtcgggttcaactgaggtatggccctggcggattttcgcgagaggcgtcccccgagcttctataaaaacaacaatcggagatcgaccccatgagccaggaactgcggcttattcggcgcatcacgctgaaactgattcccttcctgatcctgctgtacctgatcgcctacgtggaccgctccgccgtgggcttcgccaagttgcacatgggcgccgacgtcggcatcggcgacgctgcctatggcctgggcgcggggttgttcttcattggctacttcctgttcgagatccccagcaacctgatgctcgaccgcttcggcgcacgccgctggtttgcgcggatcatgatcacctggggcgccatcaccatcggcatggccttcgtgcaggggccgcacagcttctatgtgatgcgctttctgctcggcgcggcggaagcggggttcttccccggcgtgctgtactacatcacccaatggtttccggtacgccatcgcggcaagatcctcgggctgttcatcctgtcgcaacccatcgcgatgatgatcaccgggccagtgtccggtggcctgctgggcatggacggcatcctggggctgcacggctggcaatggctgttcatcgtcatcggcactccggcgatcctgctgacctggccggtgctgcgcttcctgccggatggccccaagcacgtcagctggatgagcgacgacgaaaaggcctggctcaccggcgaactcgccaaagacctgcaaacctacggccagacccgtcacggcaacccgctgcatgccttgaaagacccacgcgtgttgctgctggcgctgttctacctgccggtgaccctgagcatctacggcctgggcctgtggctgccgaccctgatcaagcaattcggcggcactgacctggtcaccggctttatcgctgcggtgccgtatatcttcggcatcatcggcctgctgatcatcccgcgcagttccgatcgtttgaacgaccgctacggccacctcgcggtgctctacgtgctgggcgccatcggcctgttcttcagtgccgcgctcagtgtgccggtgctgcaaatggccgcgctgtgcctggcggcgttcgcgatgttttcctgcaccgccgtgttctggaccttgcccgggcgcttcttcgccggcgccagtgcggcggcgggcattgcgttgatcaattcggtgggcaacctcggcggctatatcggcccgttcgtgatcggcgcgctcaaggaatacaccggcaacctcgcatcgggtttgtacttcttgtccggggtgatgctgttcgggctggtgctgaccttggtggtctaccgcctgctcgagcgcaagcacgtgctgcccgccgaccaatttgccgccagtgcccgtggcgccacccgaccttaatccaggagaacagtcatgcgtttagttcagttcgagttgcgtaacggtgaccgccgcgtcggcgtggtcgacggcacccagctgcgcgaagtacacacagcccgcagcgtgcgcgagttggccctcgccgccatcgacgccggcgtaggcctggcgcaatacgtggacagcctgggcctggatgacagctacgactacgcaacgctgctggccgacctgaggattctgccgccgctggaccacccggacccggcccacatgctgatcagcggcactggcctgacccacctgggcagcgcctcggcacgggacaagatgcaccaggccggcgacgacacggcgctgaccgacaccatgcgcatcttccgatggggcgtggagggtggccgtccaccggctggccaggcgggcgtgcaacccgagtggttctacaagggcgacggcagcatcgtggtgcgccccggcgcagccttcccggtgccaccgtttgccgaggatgccggtgaagagccggagatcggcggcctgtatgtgatcggcccggacagcaagccctatcgcgtcggttttgcggtgggcaatgaattctccgaccacatcatggagcgcaagaactacctgtacctggcccattccaagctgcgcagttgcagctatggcccggagttgcgcgtgggcgagttgccccagcatctggcgggcaccagccgtattctgcgcaacggcgaagtgatctggcagaacgagttcctcagcggcgaggccaatatgtgccacagcctggagaaccttgagtaccaccacttcaaataccaacagttcctcaagcccggcgatgtgcacatccacttcttcggcaccgccacgctgtcattcgccgacggtatacggacccaggccggcgatgtgttcgagatcagccaggccgagttcggtgcgccgctggtcaaccgtgtcggcagcagcgctgcggcgttcgaacccggcaacgtcatcaccctttaatggagaaccccatgactcagtttctcggccacaactacatcggcggccagcgcagcgccaacggcagcgtcacgctgaaaagcgtcgacgccagcaccggcgaggccttgccccaggactttttccaggccacgccgcaggaagtcgacgccgccgccaaggctgccgcgcaggcctaccctgcgtaccgcgccttgagtgcctcgcgccgtgcacagttcctggatgcggtggccgatgagctggacgcgctggcggatgattttgtcgagctggtctgccgcgaaaccgcgctgccggccgcccgcatcaagggcgaacgcggacgtaccagcggccagatgcgcctgtttgccacagtgctgcgtcgcggtgatttctacggtgcgcgcatcgacaaggcactgcccgaccgccaaccgctgccacgcccggacctgcgtcaataccgcatcggccttgggccggtggcagtgtttggcgcgagcaacttccccctggcgttttccacggcgggcggtgatacggcggcggctttggcggccggctgcccggtggtgttcaaggcccacagcgggcatatggcgactgccgaacgcgttgccgatgcgatcatccgcgcggccgaggctaccgagatgccggccggtgtgttcaatatgatcttcggcggtggcgtgggtgaagcgctggtcaagcacccggcaatccaggcggtgggctttaccggctcactcaagggcgggcgtgccttgtgcgacatggcggcggcgcgcccgcagccgatcccggtgttcgccgagatgtcgagcatcaacccagtgatcgtattgccccaggccctgaccacgcgggccgacagcgtggcgcgcaacctgaccgcctcggtggtacaaggctgcggccaattttgcaccaaccctggcctggtgatcggtatcgcgtcgcccgcattcaccgcgttcacccagcaagtcgcgcaactgatcggcgcgcaaccggcgcagaccatgctcaacgccggcaccctgggcagctacggcaaaggcctggaaaaactcctggcgcacccgggcatccagcacctggcgggcaaccagcaggccggccatcaggcgcaaccacagctgttcaaggccgatgtgaacctgttgatcgacggtgatgaagtgctgcaggaagaagtgttcggccccaccaccgtgttcgtcgaagtcgccgaccaggcccagctcagcgccgccttgcacggcctgcacgggcaactcacggcgacgatcattggcgagccggccgacctgcaacagttcgccgaactcacgccgctgctggagcagaaggtcgggcgcatcctgctcaacggctaccccaccggtgtggaagtctgcgattcgatggtgcatggcggcccgtacccggccacctcggatgcccgtggcacctcggtcggcaccttggccatcgagcgtttcctgcgcccggtgtgcttccagaattaccctgatagcctgctgcccgacgcgttgaaaaacgccaacccgttgcgtatccagcggctggtggatggcacgccatcccgcgacccgctgtaacgcgcacctgagaacaacaacaatccaggaggcatcatgtcgtgtatcgccgttaccccgcaccgtgcgcaattgggcgagggaccgttctgggacgcgcccacccaggcgctgtactgggtgaatatcgccggcaaacaggcgctgcgcctgatgggcgggcagttgcgggtatggcagttgcccgagcatgtctcggcgttcattccgtgtgaacgcggcgatgccctggtgaccctgagcagcggcgtgtatcgcctcgacctggccaccgaggccctgaccctgctgtgcgtggctgacccgcaaccgggcaaccgtggcaacgaagcacgctgcgatgcccagggccgcctgtggctgggcaccatgcagaacaacatcggcgagcagggtgaagacctgcccatcacccggcgctccggtggcctgttccgtatcgatgccgatgcgcaggtcacgccgttgctcagcggcctgggcattcccaataccttgctgtggagtgatgacggtcggcaggtgcatttcggcgacagcctggacggcacgctgtaccgccacgctatccagccagacggccaactcgaatccgcgcaggtgtggttcggtccccacgagcgtggcgggccggacggttcggccatggatgtgcagggctatatctggaatgcccgctgggacggcagttgcctgctgcgcctcacgcccgacggcaccgtcgagcgcatcatcgaactgcccgtcagccgccccaccagttgtgtgtttggtggcccggacctgaccactctgtacatcaccagcgcggccagcccgttggatcaccccttggatggcgcggtgttggccatcgaggtcgatgtgcctggaaaaccctgtcatcgctttgccggataagtccccgtttaaaaacaacaacaaggagtcacccgtatgaatcgtcgtcgtggtttgcgttccctgtgctgcgccgctgtggcggtctcggccatgagcttgagcgggctgttgctggccgctgaagaagtgaagatcggtttcctggtcaagcaggccgaggagccgtggttccagactgaatgggccttcgccgagaaagccggcaaggaacatggcttcaccgtgatcaagatcgccgtgcccgatggcgagaagaccctttcggccatcgacagcctggccgccaacggtgccaagggctttgtgatctgcccgccggatgtgtccctcggcccggccatcgtcgccaaggccaaggccaacggtttgaaagtcattgccgtggatgaccgctttgtcgacgccaagggcaacttcatggaggacgtgccgtacctgggcatggcggcctttgaagtgggccaaaagcagggcgccgcgatggcggccgaagcgaaaaaacgcggctgggactggaaggacacctacgcggtgatcaacaccttcaacgaactcgacaccggcaagaaacgcaccgacggctcggtcaaatccctggaagaggccggcatgcccaaggaccacatcctgttcaccgccgccaagaccctcgacgtacccggcagcatggacgccaccaactcggccctggtcaagctgcccagcggcgcgaaaaacctgatcatcggcggcatgaacgacaacaccgtgctgggcggcgtacgcgccaccgaaagcgccggcttcaaggctgccaatgtgatcggtatcggcatcaatggcaccgacgccattggcgaactgaaaaagcctgaaagcggcttctttggctcgatgctgcccagcccgcatatcgagggctacaacactgcgaagatgatgttcgattgggtcactaaaggcaccgagcctgcgaaatacacggcgatggacgaagtgacgctgatcacccgcgccaatttcaaggacgaactgaccaagatcgggttgtggcaatgaccgctgccgtcctgcagtttgacggcatcggcaagacctttcctggggtcaaggcgctggatggcatcagcttcagcgcccaccctgggcaggtgcacgccctgatgggcgagaacggtgcgggcaagtcgacgctgctgaagatcctcggcggcgcctacattcccagcagcggcacgctgcggatcggcgcgcaggccatggccttccgaaatgccgccgacagcattgccagcggcgtggcggtgatccaccaggagttgcacctagtgccggaaatgacagtggccgagaacctgttcctcggccacttgccctcgtgttttggcgtggtcaaccgggggctcctgcgcaagcaggccctcgcgtgcctcaaggggctggcggatgaaatcgaccctgccgagaaactcggacgtctgtccctgggccagcgccaattggtggaaatcgccaaggcgctgtcccgtggcgcccaggtgatcgccttcgacgagcccaccagcagcctgtcggcgcgggaaatcgaccgcctgatggcgatcatcacgcgcctgcgcgatgagggcaaagtggtgctctatgtgtcgcaccgcatggaagaagtgttccgcatctgcaacgccgtcacggtgttcaaggacggtcggtatgtgcgtacgttcgaggacatgagcgctttgacccacgaccaactggtgacctgcatggtcggtcgcgacatccaggacatctacgactaccgcccgcgtgagcacggcgaagtcgcgctcaaggtcgatggcctgctcggtcccggcctgcgtgagccgatcagtttcagcgtgcgcaagggcgagatccttggcctgttcgggctggtcggggctgggcgcaccgagctgttccggctgctcagcggcctggagcgcgccagtgccggcagcctgcatttgtgcgggcaggcgctgcaactgcgctcgcccagggatgccatcgccgccggcgtgctgctgtgcccggaagaccgcaagaaagagggcatcattccgctgtccagcgtcgccgagaacatcaatatcagcgcacgcggtgcccactccaggttcggctggctgctgcgcgagggctgggaaaagggcaacgccgaccagcagatccaggccatgaaggtcaagacacccaacgccgcgcagaagatcatgtacctgtccggtggcaatcagcagaaggccattctcggtcgctggctgtcgatgccgatgaaagtgctgctgctggacgaaccgacccgtggcatcgatatcggcgccaaggccgagatctaccagatcatccataacctggcggcccagggcattgcggtgattgtggtgtccagcgacctgatggaagtgatgggcatctccgaccgcatcctggtgctgtgcgaaggcgcgatgcgcggcgaacaaacccgcgagcacgctaccgaatccaacctgctgcaactggccctgccgcgcagcgtggcgaactgagagacgactatgaccactcaacacaacgtgctgcccacggcacgcaagcccctggacctgcgggccttgctggataactgggcgatgctgctggcggcagtgagcatctttttgctgtgcgccttgctgatcgataacttcctgtcaccgctgaacatgcgtggcttgggcctggcgatttccaccgtgggcatcgcggcctgcaccatgctgttctgcctggcgtcggggcatttcgacctgtcggtgggctcggtgatcgcctgcgccggggtggtggcggcgattgtgatgcgcgacaccgacagtgtcctgctcggcattggcgccgccttgctgatgggcctgatggtggggctgatcaacggtatcgtgatcgccaagctgcgggtcaacgcgctgatcaccaccctggcgaccatgcagatcgtgcgcggcctggcgtacatcttcgccaacggcaaggcggtgggtgtgtcccaggatcagttcttcatcttcggcaacggccagttgctgggggtgccggtgccgatcctgatcacgatcctgtgcttcctgttctttggctggctgctcaactacaccacctacgggcgcaacaccatggccatcggcggcaacccggaagcggcgttgctggcgggcgtgaatgtggaccgcaccaagatcctgatctttgccatgcacggggtgatcggtgcgttggccggggtgatcctggcgtcacgcatgacctccggccagccgatgatcggccagggctttgagctgacggtgatctcggcctgtgtgctgggcggggtgtcgttgagtggtggggtggggatgatccgccatgtgattgccggggtgttgattttggcgatcatcgagaatgcgatgaacctgaagaacatcgataccttctaccagtacgtgatccgcggctcgatcctgctgctggcggtggtcatcgatcgcatgaaacaacgctgatcccaagccaaatgtagttccaaatgtgggagggggcttgcccccgatagcggtgtgtcagtgtgcatctctgtctttgacactctgctatcgggggcaagccccctcccacaagtttagtccgcggagaatttgaagacggtgttctgggtgtaggtctgccctgggttcaggcgggtcgacgcaaacttgggctggttaggcgcatccggaaaatgctgggtctccagcgtaaacccgctccagtgctgataggtcttgccagccttgcccttcaccgatccatcgaggaagttgctggtataaaactgcaccccaggctcggtggtaaacagctgcaagcgccgcccggacgcaggatcatgcacctcggccgccacctgcttcacgtcaccctgggtatccaatgcccagttgaagtcgaacccaccctgtttcggctcggcgaatttgagctgcgggtgatcgtccttgatgtgctggccgatcggcgtcggcgtgaggaagtccatcggtgtgcccttgaccggcgccagttcgccggtgggaatcagcgtcgcattcaccggcgtgtaatggctggcatgcaaggtggcgacctgcttgaggatgtcgccattgcccgcaccggccaggttgaagtagctgtggttggtgaggttgagcaccgtgggtttgtcggtggtggcgctgtagtcgatgtgcagttcgttgttgtcattgaggcggtaggtgacttcggtcttcaggttgccggggaagcccatttcaccgtccttggacaggtaggtgagggtcacgccaaccgagtccttggccttgacttgggtggctttccacacccgcttgtcgaagccctgggcgccgccgtgcagcgagttggggccgtcgttgagtggcacctggtagcgcttgccgtcgagttcgaaggcgccgccggccaggcggttgccgaaacgaccgatggttgcgccgaagaacgccgtaccgctctgatagccttgcacgtcgtcaaagcccagtaccacgtcgtcgagcttgccatttttgtccggcaccttcagcgactgcaacacgccgccgtaggtgatcaccgtggcttgcatgccatggctgttacgcaggatgtactgctcgacggcagtgccgtcattggttttaccgaacgctttgtgttcgctggtaaggcctgccgcctgggcgccgccgctggcgaccagcatggacagggcaaggcccgaaagcaggtaacgagggtgcttcatggtcgaacttccttttgttgttttgagtggaatagttctactaatgtgcgatattttgtcgatatgacagcgaatttatagccttaaaccgggtttttgcaaaataaaataagactaattaagcgaggcaaccttttatgacgacgcaacatgcggtttaccccgaccttgaaggcaagaccgtcctgatctccgggggtgcctcgggcatcggcgaattcatggtgcgcgccttcgcggcccaaggcgccaaggtcggctttgtcgaccgcgcacaaagccagggcgaacgcctggcagcgctgttgagttcacgcgggcacagcgtggaattcgtcaattgcgacatcaccgacgagattgcctataaagccgccatcactcgtttcgaacactccctggggccgatcaccgtactggtgaacaacgccgccaacgacgtgcggcataccctggaggaggtcgactcggagatgttcgaccggctgatctccgtcaacctcaagcacgccttctttgccgccaaggcggtggtgccgatgatgaagggcgcgggcggcggggcgatcatcaacctggggtcggtcggctggatgatggcttcggccggctacccggtatacgccgccagcaaggccgccgcccacggcatgacccgcgccctggcccgagaattggggccgagccgcatccgcgtgaacacgctggtgccgggttgggtgatgacggaaaaacaactggcgatgtgggtcgacgatgccgccaaggaactgatcagccgcagccaatgtttgccggggagtgtgttgccggaacacatcgccaacatggcgttgtttcttgcctcggatgcctcggcgatgtgttcggcgcagaactttattgtggatggtgggtgggtctgagtcgggctcaatccttcagtcaacactgaactgatgtgggagggggcttgcccccgatggcagtgtttcagtaacaggtgtgcagactgaggccacgctatcggcggcaattcgaatcgtcacgccgccccccacattagaactggcttgcctactcgattggataacgcttgaaagccgagtgctgttccaggcgctcggcgtggcgtttcaggttggggaacgcatcggcctcgaccaccgacgccacggtgaactggctgaacgaccaggcgactgccgctgtcagggaagcctgggtcaactcctgactgtcaggcagttgtttttccagcagcgagtaggccgccagcaactggccgctgacgcgatccagccagggcgcatgcagcttttcggccgggcgcaggttgtgttcgtaaacgatctgcacgcttttctcgcaggccgccagggccaggccaaggatatgcaggtcatgggcacgggcgtcgggggaagggggcagcagctttttgtcggccggggccagggtttccagatagtcgaggatcaggctggaatccatcagcaccgtgccgtcatccagcaccagggtcggggccttgaccaccgggttgatctgggcgaactcgctgaaggtgctgaacaccgacagtggttcatgcacaaaatccacgccgtacaggtccagggaaatggccacgcggcgtacgtagggcgagtccagcatgccgatcagtttcatgaagcctccgttgctcacaaggtgatggctccagagagtaagggcacaggatcggcatgcgcaatgactgaatgttgcctgcaaaggtcaggctgcggtcattcaggcaggacgcctgatgttctgccggctggcccccggtggctggccggtaatgcgcttgaatgcacgactgaacgccgcctgggaggtgtagcccaggcgcagcgccacttcttcgatgggtaaacgctccagggtcagccattggctggccaggcgcatgcgcagttccgtcatgtagcgcagtggcgggatacccaaggtcgcctggaagcgttcggcgaataccgagcgggaggtatgacactgcgcggccagttcggccacgctccaatcgcgcccgggttgctggtgcagcacgagcagggcgcccgccaaccgtgggtcgcgcaacgccgccaccagccccgaggcattgccgcaggcacactccacccaaccccgcacaatcatggcggccaccacatcggccaggcgcgtgaggatgccggggtagccgacgcgagccgtggcgacttcgcgttccatcaccgccaggatcggcatcaggccggggtaacgctggccctgggcatcgatcagcatcaaggccggcatcaggctgcccagcccctggagactgccgagttcgaactccatgcaggcactgaacagcaaggtacgtggcggcgagtccggtgatgcatccacagcgcagacgctatcgcccagcgacgtcgcgtcaaagcctccgatgtcctgcaccggcctgtccgcactggacagcagcgcatgggcaccgccgtgggagatgaacacggcattgcccgcggacaattcgaacaggctgtcgtcgtcggtgcgcagggtggctgtccctgcggcaaggaaatggaagtaggcatgccccggtctggcgtcaaagcccatgccgaagctcggcccggcctggatacgtcgatactgcacgccgcgcaggcgcatgccgcgcagcagttcgtcgataaggtcggaggacagggtgaacggtgccgctgcagtcatgttcggggtttcggtcaaaaactaaagtgtttgaatcatagatcatccgggttggcaaacctagactggccgtcgtgctaatgaccgaggatgtcgtgtgatgaatgattgtgtagcccaagccgctcaccctgcccaggtggcgcccgatgcgcccgcctggatggcggtgttttccctggccatgggggtgttcggcttgttgacggccgaatacctgccggccagcctgctgacgccaatggcgatggaccttggcgtgtcggaggcgctggccgggcaggccgtgactgtgacggcggtggtggcgttgttcgccgggttgctggtgccgggcctgacgcgtggaatcgaccggcgcgtggtgctgctgggtttttccctgctgatgattgcttccaacctgttggtggcgttttcttccagcctggcggtgctgctgttgatgcgcatcctgctgggggttgccctgggcggcttctggagcatggcggcggctgtcgcgatgcgcctggtgccggcggcgctgctgccccgggcgctgtcgatcatcttcagtgggattgccgtgggcacggtggttgccgtgccgctgggcagctacctcggcggcgtgtacggctggcgcagtgcatttgtggcagcggcagcggtcggcacggtgacgctggtgttccagctgttcacgctgccgcgcctggctcccacgggcagtgcacgcttgcgcacggtgctggatgtgctgctgcgtccaggcatcgccatcggcatgttgggctgcgtgctggtgcacaccgggcactttgcgttgttcacctacatccggcccttcctggaaagcaccacgggcgtgggcaccgaagggctggccttgatgctgctgggcttcggcgccgccaatttcgtcggcacgctgttggccggttggatgctggtgcgttatccgcgcggcacgctggtgctgatgccggtgttggtaggcgtcgcggcgctggccctggtgttgctgccggcctcgctgccaggccaggcgttgctgctggcgctgtggggcatggcctttggcggggtgcccgtggcgtggtcgaactgggtggcccgcgctgtaccggatcaagctgaaagtgccggcggcatggtggtggcgtccgtgcaatcggccattgcggcgggcgcggccggagggggcgcgatgttcagtctcagtggcatcagcggcgtgtttctcggcgccggtgtgttgatgctgttggctgccctgttgattgcactgcgggtaacagtgccgggcaatgacgccgtgggtgcaccgctgcatctttgacgtcagcctggagattggccgtattcacggtgtgacgagccatcgacctttggtttagtctggagcgcttcgttgaacgcaagcacatttggagcagtaagcatgaccgattacgtacccccgaaagtgtggacctgggacaccgagaatggcggcactttcgccagcatcaaccgccctgtggccggcgcgacccatgaaaaggaattgccggtgggcaagcatccactgcagttgtactccctggccacgcccaacgggcagaaggtcacgatcctgctggaagagctgttggccctggggcacagcggcgcggagtacgatgcctggctgatcaagatcggtgacggcgaccagttcggcagcggcttcgtgggggtgaaccccaactccaagatcccggcactgctggaccgcagcgacgccacgccgattcgggtgttcgagtccggagcgatcctgcagtacctggccgagaagtttggcgcgttcttccccaccgagccggcggcccgcgccgaatgcctgtcgtggttgttctggcagatgggcagcgcgccctacctaggcggtggtttcggccacttctatgcgtatgcgccgagcaagatggaatatgcgatcgaccgctttgccatggagaccaagcgtcagctcgatgtgctcgaccagcgcctggcggtgagccaatacatcgcgggtgatgaatacaccatcgccgatatcgcgatctggccctggtatggcgggttggtcaaaggccgtttgtacggcgcggcggagttcctctcggtgcatgaatacaagcacgtgctgcgctgggccgatgcgattgaagcacggccggcggtgcagcgtggacggcgggtgaatcgggtgtctggcgaggagcagttacccgaacgccatgacgcaagcgacctggactgagtgtgggagggggcttgctcccgatagcggtggatcaggcacggatgtatcgactgacccaccctcatcgggagcaagccccctcccacatttatttgtagcgctgctcgaacaccgccacctgctccggcttgatcagttcaaacggcacccacacctccggctcaatcgcctcgcccttgatcattcgcaccgccgcctgcaaggcctgtgtggcctgggccttcgggtcctggaacaccgaggccgtcagcaagccgcgcttgatcgccgccagcccgtcgggcaagccatcaatgcccacaatcgccacatcgcccttggctttgcccgcttgctgtaaagccatggccgcaccaatcgccatttcatcgttgttggccacgatggcatcgaactgcgtgcccgccagcagccagttgctggtcaggtccatgcccttgctgcgctgccattcggcgctttgctgctcgaccaccttgatcccgggaaagtccttgagcacctgtttggcgccctcggtgcggtcatgggtggcgttctgtgcgaggtcgcccatgatgatcgccacgttgcccttgccgccgagtttttccgccaggtagcgcatctgcaactgcccggcctcgatgtcgttggaggccacggtgaccacgcctttgggcagggtgcgttcgtccgggtggcggttgacgtacaccagtggcgtcttggcggtgacggcggcgcgggtcatgttggcggtggcggcggtgtccaccggcagcacgatcaccgcgtcgaccttctggttgagaaagccttcgacctgattgagctggcgcaccacgtcgccctgggcgtcttcgaactggatctgcacatcctgctgcttggcggcggcttcgaggccggtgcgcacgtaggtcatgaagttatcgtcgacccgggcgatgctcacgccaatgcgataggcggcgaaggtccattggctgaacagcagcaacagcgtggcagcaagcaatgaatagcggttcataagggggttccttttattgttatagggtgaacgcctggcggaaacgtgccagggccaactcactgtcaccgctggcccagccttccaggccgaccacgccgctgtagcccatggcatgcaaggcccgggcgatggccgggtagtggatttcgccggtgccgggctcctggcgccccggcacgtcggccacctggatttcaccgatgtgcgggccggcgcgctggatcagctcgatcaggtttccttcgccgatctgcgcgtggtacaggtccaggttcatcttcaaatgcgggctgcccacggcctcgatcaacgccagagtgtcgtcggcgcgggcgaatggcgtgccggggtgatcgacctcggtgttgaggttttccagcaggaacacacggccggcgtcttcccccaggcgggcgattttttccagggtcttgcaggcgctcagccacatgcggccggtggtctggctcacgggttggacgggcaggccgccgtcacccaggccggtaccgtgcaggttgaggctagggcaattcaactgctcggcgacccctaaggattcgcgggcgctgtcgagcaactggcggatgccgtcggggtcggtgagggtgccgctgatgtagccggtcatggacgtaaagtcggcaccggtggcggcgagggcggcgatgtccttgtgggtccagtcccagatttcaacgctgaagcccagcgcatgaatacgctgtacgcgctcgatgaagggctggtcgagaaacaccatctccgcgctgatcgcgagcttgaacgggctcatagggtcaccgccttgcccgtttcgaacgattcgatacaggcgcgggcaatcgccagcgccgcgcgtgcgtcttcaccgctggccaggggcttggcgccgctgcgcaggcaatcgacaaagtggttgagctcggcgatgtaggcgtcgcgcaacaggtcggtgtccatgcgctgggtgtcggcctggatgccttgggcgaggtagcgcaccaagtcggactcgttaaggctgcccatgctcagcatgccggcgctgccgaacacttcgccgcgcacgtcgtagccatacacggcctggaaattggcttcggcagtggcgatggcgccgttgtcgaagcggatcgcaaccacagcggtgtcgaggaagcctttgtttttgtaatcgggcgcgatcagtgcgtcagccatcacgtagacctgcaccgcctcggcgccggggttgaggtagcgcagcgtgtcgaaatcgtggatcagggtctcgaggaagatcacccattgcggcgaagcggccgggttgttcagcgccgggtcgcgggtcagcgagcgcagcagctgcggggtgccgatgcggccggcggcgacgtcgaggtgcgcggtgcgaaagctcttggcgaaacgccggttgaaaccgacctgcagcggcacccgcgcatcggccgcggccgcgatggcacggtcggcctcatccagggtgatggccatgggtttttcgcagaagatccctttgcccgcgcgggccgcgctgatcaccagctcggcgtggctgcgggcgggggcggcgatgagtacgccgtcgatgtccgggtcgtcgagcaattgttgagggtcggtgtaaaccttgctcacgcccagttcagcggcgaggcgggcggcctggcctggcgtcgggtcggcaatcgccgccaggctggcgccggggatatgccgagcggcggtcaggccgtggaagctgcccatgcgaccggcaccgatcaaacccaggcagatgtgctgtgtactcatgaaataaccccttgttgttattggccccaggacggtcctggtgggcgaaggggtaggagcaaggcttgtgccaattcataacacattgataaatagcgatttattattattcataagcaaatagtgttcatttaatgaacatgtctatactgacatgtcaaaaacatggacatggataccgccccaatgagcatggcgttcagcgtgcaagacctcgactacctcgcagcccttgggcctgctgcgctgaatgatggcccagtggccgcgctggagcaggcctggcgtgactgcctggccggtcaggtcgagcgcccggcgcacgtgcgccaagtgatctgggattcgtggcggcgcagcgtcgaggccggtatcgacccggcagacaaggcgtaccgcttcgtggccgccgaaaccctggccgccacccagaccacccaccgcgtgctgatcgccgccgccgcgcaagtcatgcgaggtttgctggcctacaacccgcgaggccatatcaaccttaccgatgccgacggcaccaccctgtatttctgcgggctggacatcacccccgtgggcagtcgtctgctggaatcggtacaaggcaccaactgcaccggcctggcgctggccgaagatcgcttggtgtacgtgctggccgaggaaaacttcggtatcggcctgcgccagcgccgcatgcactgcgccgctgcgccgatcaagaatgctcaaggccagaccctggccatgctgaccctcaccgccgagcccggctggtttcacttccataccctcggcacggtgcaggcggccgccgaggcagtgtcgcggcagatggcgttgcaggcgttgctggaagagcagcaaaccgtgctcgaagtcctcaacgaaggcctggtggtgctggacgagcgcggctgcatcaaggcgctcaaccgttatgcccggcagttgttcggcgtagggctggagttgatcgggcggccgttccagcaactgggccgtagcgagttgagcgatgccctgggtgaacccgtgcgcgacctcgattgcaccttccacctgaacaatcgcagccaactcgcctgcctggtttcggtgtgcccgctggagcagggcggggtgatcgtgtcgctgcgcgaaaaccgccgcattcgcgaaatcacccggcgtcttatcggcacccaggccagctatacatttgaaaccatccagggcaactcccgcgccatccacgacgccctgcacctgggacgtatcgccagtcgcagcgattccaccaccctgatcctcggcgaaagcggcaccggcaaagagctgttcgcccaggccatccacaacggcagcgaccgccacaaaggccccttcgtagcggtcaactgcggggcgatcccgcgtgacctggtgcaaagcgagctgttcggccatgtcgaaggcgcgttcaccggcgccacccgtggcggctcggcgggcaagttcgaactggcggacggcggcaccatcttcctcgatgagatcggcgacatgtccttcgatgcccaggtcagcctgttgcgggtgttgcaggagggggaaattacccgcgtcggtgcgaaaaactcacggcaagtggacgtgcgcatcatcgccgccacccaccgcaacctgagtcaggcggttgcggagggcgcgtttcgcgaggacctttactaccggctcaatgtattgaacctgaccgtgccgcccctgcgcatgcgccgtgaagacattccgttgctggcgcggcacttcctggcgcgctgtgcacgttcgttgcgtaaatcggtgcagggcttttcgccggaggcgatggcattgctgtcggcctatggctggccgggcaatgtgcgggagttggaaaacagtattgagcgggcgaccaacctggcgatgggcgagctgattcagcctgccgatctgccgatggaaaccaagcagcacaccccgctgcgcgcctatgagccgcaacccgcccaggacctgagtagccacgaaatgcacgccatcgtcgccgcactccaaaataccggcggcaacatccgcctggccgcccggcaactgaatgtgtcgcggggcgggctgtacaacaagatgagccggtttggcttgagtgccagcgatttccgccgcgcctgagattcaagcagcgctgacccctgtggcgagcgggcttgccccgcgttgggctgcgcagcagcccccaaaccagcttctgcgaaacatcgggtataccgcgttcgtctttgatcaggggagcttcgctccccaacgcggggcaagcccgctcgccacagacagccagcgcctgagtgccgttagaggttctccgacgtcacaatctgcggcggtatatacacccgctgccgcaccggatcgaaccgctcggcactctgcaactccaccatcaactgcaccagcgccgtcgccgtctggcccggttgcgagtccatcaccacatcgatcaagccctggcgcagcgcctggcgcgacagctcggtggactcctgcaggatgcaacacagcgctggccgcttgggcaactgcgccagggcgctgatgatgccgtcgccgccgccgcccaccacgcacaggccgcgcaggtcgctgtggcggctgatcaggtcgagggtggcttcttcggtgatgtcgcagttgtccaggttgatcaaaggctccagcggcttgagccccggcgcgtgctcggccaggtagctgtgcaggccttcgacccgtgcctggtggccgagaaaacgatggccgccgagcaggatgcccacgctgcctttgcgcgcgccgcaggtgcgggcgagcaaccagcccatggtgcggccgaccacatgattgtcctggcccacgtagggttcatcggcctgttcgtggatatccgagagcagggcgaccaccggcacgccggctgcgcggatctgcgccaggcacgcgttgatcagcgggtgcgcgaagctgaccaccgccaggccatcgcactgcacggccaattgttcgatctgcgcgacgatggcgctgggcgagcgatccacgatgtactcgaactggcacgtcaggttggcgttggcatgctgttcggcagccgtgctgattgcctgcgccaggctggcatagaacgcctgggcggtggccagcaacaggatgccgaagcgataggtcggccgacgttcgcgaatgcgctggccgatcagccgcgccgcgaaataccccaccgcttcggccgcctggaacacctgctcggcggtctcgggattgaccggtgcccgtgcattcagcacgcggtcgacggtggccacactcagcccggcctgggcggccacgctggcgatggttgggcgtttgtggttgttcatgactggccccttgagcgtcttgatagaaaactatcaagccccgctgggcctggatgatagcttgatagggaatggattcaaggccttgagggtgaataaccggttctctaaggtgggtttcacacagcaccagaaaccacccgcttgcggagaacaataacaatgcctggacacaccgctcctctcacccgtcgcgactacagcctcaccggccccgaagccgcccgcgccgctgaaaaaggcctggtctcggccaactggtaccagtcgcccatctcgcgtaaacgcatgaaagaactgatgcaacgccgtgacggcccggcactgctcgacacggcgatctgggtgatcgcactgtttgccagcggttttggtggctactggttctggggcacctgggcctgcgtgccgttcttcctcgtctatggcgtgctgtatggcaccgcgtccaacccgcgctggcatgaaaccggccacggcaccgccttcaagacccgctggatgaacgacgtgctgtaccaggtcgccagcttcatgtgcatcttcgaaccccacgtgtggcgctggagccatgcccggcaccataccgacaccatcgtggtcggccgcgacccggagatcgtcgagccgcgtccaccgagcttcctgatgatgggcctgagcctgttcaacctgcccctggcctggaagaccttcagcggcgtggcgcgccacgccatcggcaagatgagtgcccaggaagcggacttcatccccgaatccgaatggcccaaggtgttccgtgccgcgcgcatctgggttggaatttatgccgtggtgatcggcaccgccttgtacctgcacagctggctgccgctgatgctggtgggcttgccgagtatttatggcgcctggctcggctatctgttcggcctcacccagcatgttggcctggctgaagacgtactcgaccaccgcagcaattgccgcaccatctacatgaaccgcgtgctgcgctttatctacatggacatgaactaccacctcgaacaccacatgtacccgatggtgccgtaccacgccctcgcgcaattgcacgaagaaatccgcagcgactgcccgccgccctacgccaacctgttcgaggcgtacaaggagatcctgccgaccatctggaagcagcgcagcgaccccacctatttcgtccagcgtccgattcacccgaacacgcatccggccgcccatgcgccggtgcatgcagaaaccgctgccggctgacccccctccaagcacaagagaaaacgccatgaacgatcaatggatcgacgtctgcgccgtgggcgaaatagacgaagaagacgtgctgcgcttcgatcacgggccgcacacttacgcggtgtatcgctcggccgagaatgaatttttcgccaccgccggcctgtgcacccacgagaaaatccacctggccgacggcctggtgatggaccacgtgatcgagtgccccaagcacaacgggcgcttcgattaccgcaccggcaaggccctcggcgcgccggtgtgcgtcaacctcaagacctacccggtgcgggtcgaagcggggcgggtgttgctcgccgtcacggcttgatcatgaacgatcccttgatcatcgtcggcgccggccatgccggtggccgtgcggcgctgaccttgcgtgaagaaggctacaccgggcggctgatcctgattggcgatgagccgcacttgccctacgagcggccgccgctgtccaaaggcgtgttgcagggcacgacggacctggccggctgcagcctgtgcgacagcgtccggctggccgagttgggcattgagcatatcgccgctaacccggtgacgcagttgcagccgcaacagcatcgcctgcaactggccgatggccaatggctgcggtacgccggactgctgctggccaccggggggcgggcgcgccgcttgcctcaggagcaggccaacctgctctacctgcgtacccacgatgaagcgctggccctgcgcgctgcgctgaaggccgggacgcggctggtggtggtcggcggcggattcatcggcctggaagtggcggcgacggcacgtggcctgggctgtgaggtaaccctgcttgaagccgggccgcgattggcgggccgggtgttgccgccggttatctctgaggcgctgctggccttgcatcgccagcacggcgtcgacgttcgcctgaaggtggccttggagtcgatccaggccgacgccgtgctgctggtggacgggcagcgcttaccctgcgacctggtagtggtcggcatcggcatgcaacccaatatcgaattggccacggcggcggggttggacgtggggcagggcattcgcgtggatacgcacctgcgcaccagcgcgccggatatttttgccgccggtgacgtgtgtgagtttcgcctggatggcctgtatcaacgccaggaaacctggcgcaacgccgaggcccaggggaggcatgcggcgctgaacctgctgggccgcgatgtgccgttcgaggcgctccccggattctggtccgaccagtacgactggggcttgcagaccgtcggcgtgatcacgcccttgacggtcagccggccattggcgggcggtggcttgctgctgttttacctggacgccaatcaccgcttgcaaggtgcctgcggatgggcgcccggcaacagcgtggccaaggacatcaaactctgcgagcgcctgatcaacgcgcgactcccactcgatcccgtcagcctggccgaccccgagctgtccctcaaacacctgctgcgaggctgatatgcgccaattcctggtgttccaatccctgtgggccatgcagaccgaacccggcccactcgaggctcaactcgagcgcatcaaggccgccggtttcgacggcattaccgaccatttctacgaacccgccgatgtcgcccgcctgcacgccgctgccacagcgcagggcttgcagatcgaaggccagttgttcccgcaatcggtggatgacctggccgccgcactggatgtgatcagcgcctacggctgccaccacctcaccctgcaagccgatgtgcgcccacgcacccaggccgaggcggcccgactggtggaaggctggcagcgcttggccgagcaggtggattttccggtgctgctggaaacccaccgttatcgcctcaccaacgacctgctgttcacccttgacctgctggcacagatgccggatttgaagctgctggccgacctgtcccactacgtggtcgggcgtgaactgccggagcctggcgccgccgaggacgatgcgcagatacgccgcatcctgcgcaacagctggggtttccatggtcgcgtggccagtagcgagcaggtgcaggtgtcgttggacttcccccagcaccaagcctgggtgcagcggtttaccgagtggtggcgctacgggatcgaagactggctggcccgcccgcagacgccgcagagcctgtcctttacctgcgaactcggcccgccgccctatgcgatcaccggtgcggacggccgcgagatcagcgatcgctgggccgaagcgctgaagatgcaggggctgatgcgtgaggtgtggcgcagttgtcagaaatgatctgctaatctgcgcgggttcaatctcgccctttagcctggactttcaccatgaccccatcctccgttcagccgcccctggaaccgcagtccgtgtgccacccgatcaccagcagcgcgattttcatggtcgccactgtcacccccggcagcgaggacagggtacgcgcctggtgcgccgatatcgccgggctggtgcgctcggtgggcaagcgcgtgccggcgggcaacctgacctgcgtctgcgggtttggctcgaatgcctgggaccgcctgttcggcgcgccacgcccggcggcgttgcacccgttccgtgagttcggcgtggcagggcgcatggccgtgtcgacaccgggggatatcctcctgcatatccgcgccgaacagatggacctgtgcttcgaactggccacccacatcatggcggccctgggcgacagcgtgaaggtggtggatgaggtccagggtttccgctatttcgacatgcgcagcatcatcggctttgtcgacggcaccgagaacccggtagggcgcaaggccgagggtttcaccatcgtcggcgatgaagacaacgagtttcgcggcggcagctacgtgctggtgcagaagtacctgcacaacatgaccgcctggaacggtttgacggtggaggcccaggagaaagtgatcgggcgcaccaaattgtcggatatcgagctggatgaagaagccaagccaagcaactcccacagcgcattgaccgtcatcaccgacgagaacggcgaagaagtgaagatcctgcgcgacaacatgccctttggccgacccggagccggggagtttggcacctacttcatcggttatgcgcgttcgccgcagcccctggaattgatgctggagaacatgttcgtcggccgcccggtcggcaattatgaccgtctgctggatttcagcacggcagtcaccggcggcctgtttttcgtgccctcggctgacctgctggaagaattggccgaccgaaccggcagtctgtaaggcaacacagtacaaatgtgggagggggcttgcccccgatagctgtgtgtcagtcaacttatatgcagctgacactgcgcaatcgggggcaagccccctcccacattggattattggtggtttgagatttgtgttgggtcagctcaacagcccagtgctgaccgccacaatcaggaacacccccagcagcgcacggtagatcacgaacggccaggtggagaaccgctccaggaacttcatcaggccccagatcgcaaagaacgccgagacgctcgccaccaccagaccgaacagcaagtgcggccaggcatgcgccggcatgtcggcgtgcagcaacacccacaactccttcagcccggcgagggcgatggccggcaagcccagcaggaaggagaagcgcgccgcttcctcacgcttgaaattgaggaacagggcagcggtcaacgtggagccggagcgcgatacccccggaatcaacgcaccaatctgcgcaatcccgacgatcaacgcatcgcgcaggcgcatttcgctcacttcacgggtgtggcgtgcgcgaacctccgccaccgccagcagcaccgccatgactacgcaggaaatgccgatcaccatcagcccgcgcagcggcgagttgcatgcgttcaaggtcgaggacagcgccaggccggcaatcccgatggggatggtcgccagcacgatcgccaccgcgagtttgaaccagcggtcgttgtagtcaccccgacgtaccgcgccgatgctgccggtggtgacctggcgcacatcgcgccagaagtaactgaccaccgccgccagcgccgccagttgcatggccgcggaaaacgccgagccggggtcttgccagccgagcagggcgggcaccacgcgcatgtgggcggtggacgacaccggcagcagttcggtaatgccctggatcacgcccaggatgaagatctgcaggtaatccagggaggcaaaacccacatccaggccggcggtacacatgttggtcaaaataggtgtccttgaagagcagaggcaaatttcacgaagtttattcgaaatgtttcaaggtttcggcagaggcaacacctatttgcaatcggttcagcaagtagaaaggttggcctctgcccgtgttttgtgaacaatggcgccctgcgttttttcaccgagagccccatgcctgaaaccaccgtcgaattgatccagaccggccccgaagaagccgagctgatccgtaatctctaccagtactacgcctatgaatcgtccgattgggaacaggaagatgtggaggccgatggccgtttctatatccatgacgaacacctggcccgctactggcaagacccgcaatggagcgccaacctgctgctggtggatggctacatcgccggcttcctgctgatcgaaggcagcgaactgccaggcatcgacgccctggaactggccgacctgttcatcctcaagcgctaccgccgcaaaggcattggtcgcgccattgccagccaggtgctatgcagcggccaggccaattggctggtgcggttctatgaccaggacgaagtgtcccaggcgttctggcgcaccgtgctggataacctgccgcgcccggtgcagacgatagagctggaggatgacccgcagttggtcagttacctgatcacgcgggcggcgttgcattaaaagcctgctgcatcacctgcggcggctggccgaacgcccttaaaaacgcctggcgcatacgctcgcgatcaccaaagccggtttcgcgggccaccacctcgaccgggtgacggctggtctccatcagcgcccgggcggcttccacacgcagggcttcgatggctttggccggtgtctgcccggtttcctcgcggaatacccggctgaactggcgtgggctcagccgggccacatcggcgagggcttctaccgagaggtcgtgggtcaggttctcacgggcgtaggccagggccagttgcacgcggtctgacttggggtccagctccaacagcgccgacagttgcgattgctcactgccgcgacgctgggcaatcaccagtttgcgcgcaatgcgccgggcgaggtcgctgcccaggtcgttctccaccatggccaacgccaggtccacgccggcgctcatgccggcaccggtccacacctggccgtcgacgataaacagcttgtcttcttccaggcgaatgtccgggtagcgcttgcgaaaggccggtgcgtgaatccagtgggtggtggtgcgcttgccttcgagcagaccggcttcggccagcacgaagatgcccatgcacagcgaggccacgcgccgcgactgggcggaggcggccttgaccaattccagcaggttggcttccggcaggcggaattccaggtagccgctgacgatcagcgtgtcgtagccctgcggccggatcggcgtggtgttcacggaaaagccctgggacgtcatcaccgcgccgccactctccgacaccaggtggaactcataggctggctcgccgcgcagcaggttcgcgcactcgaacaccgaacccaggctgaggctcagggattggaagttcgggtaaaccatcagcgcaacgctgtgcatcgtcattctccaaggggcgcgggagaggggattgtcggcgcgtgccgggtaaacggcaactgccttcgcggcatgtccggaatccttgcggatctgacattgtgcgcgatagccccgactcctaacattccctcaacgaactagacgactggtctaatcggacgggatcaagcatgagcagcgaaaccaaaagtgcaagacagaccattctggacaccgcgcaacgtattgtcggtcgcaaaggattttctgcggtgggcctgaacgaaatactgcaagccgccgaagtccccaaaggttcgttttatcactacttcaactctaaagatgcgtttggcgttgtattgcttgaccactacttcgaccactacgtgcagggcatgcagcagttgtttgaacagccgggcatgagccagcacgccaagctgatgcgttattggcacagttggatcaacaaccagaccggctgcaccgacgcgggcaaatgccttgccgtcaaactcggtgccgaggtgtcagacctttcagagccgatgcgcctggccctgcaacgcggcaccgcacgcaccatcgggctgctcgccgaggccttgcagcagggtgtcgaagacggctcggtaacgcttacgcaacaccccgaaagcctggcccagcgcctgtatgcgttgtggctggggaccagcgtcatgagcaagatcacccgtacagcggcgccgttcgaccaggcgctggggttgacccgacagttgttggggcatccgcacgacactgacactcacacctatcgaggcactggaaaatgaaagtattaatggtactgacctctcacgaccagctcggcgataccgggcgcaagaccggcttctggctcgaagaatttgccgcaccctattacgcgttcaaggacgccggcgccgacgtggtgctggtttccccggccggtggccagccgccgctggacccggtcagcgacctgccggacttccagaccgaacagacccaccgcttcgctgccgacccagccgcgcaacaggccctggcgaccacgctgaagctggattcggtcaacgccgatgacttcgacacggtgttctacccaggcggccacggcccgctgtgggacctggcagagtcgccggtatcgatcgcgttgatcgagtccttcgagcgtgccggcaagccgatcggctttgtctgccatgcaccgggtgccttgcgtcacgtcaaggcagtcaacggtgagccgctggtcaagggccgtcgagtcaccggtttctccaactcggaagaggccgccgtggaactgaccgatgtggtgccgttcctggtggaagacgagttcaagaagttgggtggcctgtatgagaaaggcgctgactggcagtcctttgtcattaccgatggcttgctcgtcaccgggcaaaaccccggcagttccagcgatgtcgccaaggccctgctgaaactcaccgcttaactcaataaaccgctgcaagcattggcgacttgtaaaagtcgccaatgctttagcgcgcccgctatttggaaattattcaatgaatcactctattttaagtaccccggtaaacctggggcaccacacgctgaacaaccgtattgtgctgccaccgttgacgcgccagcgcagcgcccagccgggcgatatcgccactgacttgatggccgagtattaccgccagcgcgccagtgccggcttcatggtcagtgagggtacgcagattgaaccgcgtggccagggttacgcgtggacgccgggtatttatacgccggcgcagatcgacggctggcgcaaggtcaccgaggcggtgcatgccgaaggcggggtgatctttgcccagttgtggcatgtcggtcgggtgtcccataacgccttgcaaccggacggcgccgcaccagtggcaccgtctgcgctccaggcattgcaggccaaggccttcatcgaaaccgcgccgggcgagggtgagttgaagcaaccgccggtgccgcgagcgttgaccaccctggagatcgaggagctggtcgggcactacgcccaggcggcgcgcaatgcattggatgccgggttcgacggggtggagatccactcggcgaatggttacctggtcaaccagttcatctccgcccattccaaccagcgtgaggatgaatacggtggctcgctgcacaaccgcctgcgcttcctgcgcgagatcgtcgaagcggtgaccgccgtggtcgggccagagcgcctgggtgtgcgtttctcgccgctgttcagcggcaccgaccaggaccgggtgtacatcggcctggtggaagatgacccgcaccacacctatatcgaagcgatcaaggtgctggaggcgtcgggcatagcctatgtgtcgattgccgaagccgattgggataacgccccggtattgcccgaatcgttccgccgagcggtacgcgacaccttcagcgggcggatcatctatgccggtcgctacaccgctgagcgcggtgctgatctggttgaagcagggctggcggatttgatcgcgttcggccggccgtttatcgccaatccggacttgccgcagcggattttcaacgactggccgttgaacccgctgcgggcggaagggatgtatgggggcggcgaagcgggttacgtcgactatccggtgttcgccgggtaatcaaaccacccgcaacacaatcttgccaatgtgatcgccaccttccatccgcgcatgcgcctgatcggcctgggtgtaatcgaacacctggtcaatcatcggcaggcagcgcccggctgacagcaccggccatacatgctcgcgcagttgctcggcgatggcggctttctcgtccttggtgcgggcacgcagcaacgagccggtgacgatggcgcgtttgccgaggatggtcagcaggtccacgtcattggccttggcgccgccgaggaagcccagcatcaccaggcgtccgtccatggccagcgccttgaggttattgttgaggtaggaggcgcccatgatgtcgaggatcacatcgacgccttgatctccgatcacctcggcaaaatcctgctcgcgataattgatcgcttcagcgcccaaggcacggatggccgcacatttctcttcgctgccggcggtggcgaatgcctggataccgaactcgcggcacagcatcagcgcggtggtgccgatcccgctggtgccgccatggatcagcacgcgctggcccttgtgcgcgccgccgatgccgaacaggttggcccacacggtaaaaaaggtttccgggatagcggcggcctgaatccactccatgccttcgggaaccggcaacgcctggctggcgggcaccgcgcagtattgggcgtagccgccgccgttggtcagggcgcataccctgtcgccgattgcgtattcgctgacccctgcgcccagcgcgaccacctcgccggccacttccaggccggggatcgggctgaagccgggtttcatcgggtacttgccggcacgttgcaaggcgtcggggcggttgaccccggcggcgtgcacgcggatcaggatttcgccgggggccggggagggcaccggttcctggcgcggcttgagcacctcggggccgccgggcgtggtgatttcaatcagggtcatgtcggtaggcagggtcattgggcgaatcctgagtattttcgatggctgtgagcataaccgagattggtgatgcaataatgctgcgaatcagcatgataagagtgcatatatgcagcagtggaggaggcaatgaactgggacgacgcacgggtattcctggcagtgtgccgcgaaaacacattgcgcggcgccgcacgggtgctgggcgtcgaccaggccacggtggggcgccgggtcaacgccttggaaaagtccttgaacgccaccttgttcctgcgcacctccgagggctacgcgctcactgcggtcggcgaagcagcgttgctttcggtggagaaaatggagcgctcggccctcgacctggagcgccagatccagggcctggatgaccgcctgaccggcaccgtgcgggtcagtactaccgattccctggccatcgatttcctgatcccggccatcgcgcgcctgcacgaccaacaccccgatgtgcgcgtgcaactggacgcgtccacccagatcctcagcctggccaagcgcgaggccgatatcgccgtgcgcaaccagcgcccggataaccccgacctgatcgcccggcgcattgcgcgctggccgctcgggttgtttgcgtcccagggctacctcgaccgccacggcgcacctgagccgggcagcctgttcgaaggccatgacctggtggtgtaccaacctcacctgcaaagtcagaaggacatgaccctggtctccgaacccttgggccgtggacgcattgtcgcggccttgagttccagcctgctggtgcgccgctccattgctgccggcatcggcatcggtgaaatcccggtgtgcaccggtgagcgcgacgggttggtgcgcctatggccggagcgcacgcggccactgccgtacgacgtgtggctggtgacccacgccgatctgcgccacaccgcacgggtgcgggcggtgatcgaggagattgtcgcggcgtttgccggcacgggggagtgaggtcagcacaggcttgcaagcgcttaggtggttcggtcgacacaatcgatgtttgtggcaatcaaccgagagcacgtatgaacgaatcgacgcgtcaggacctgggattattgtttctgcggatcagcggggcgctgttcctgctgtgggtgcatggcttgcccaagttgctcaactacagcgagcaattgaagctgatcgaagacccgtttcacctgggggcgaacatcacgttgttgctggcgattttcgctgaagtgctgtgcccgctgctgatcattgccggggtgctggtgcgcctggcgtgcctgccgatcctggcggtgctgttgatcgccctgttggtggtacacccggagtggacgctgttcgaagggcagttcggctggctgctgttgatcatcttcaccaccttgctgatcagcgggcctggtcgcctggtcctgagccaacgtttctcctgagcaaaaaaaggccgggcaagcccggccaaaataaggagagggtggttcaggcgtttcagcgttgcaggaacgccagcaggtcttcattcaactgctgcgcatgggtcacggcgaacccatgtggcgcgtccttgtagactttcagttctgcgcccttgatcgaagcggccgccactttaccggtggtttcgaacggtacgatctggtcgccatcgccgtggatcaccagggtcggtacgtcgatcctggtcatgtccgggcggaagtcggtttcggagaacgcggtgacgcaatccaccgttgacttgagggatgccagcatcgccacttgcagggtctgggtcagcacaccgtcagagaccttctggccctggttgaggccgaagaacggtgtgttgaagtcgctgatgaactgcgcacggtccttcaacaggccggccttgatgccatcgaacacttcagtcggcacgccttgtgggtagtccggtttctggccgaacaacggtgtgactgcacccagcagcaccaggccggccacgcgcgcgctgccgtggcgtgcaatgtagcgagccacgtcgccaccgcccatggagaagcccaccagggtcacgtccttgaggtccaggtgttcgatcaactgggcgatatcgtcggcgaaggtgttgtagtcgttgccggtccacggctggtccgagcggccgaacccacggcggtcaaaggcgatggtgcgaaaaccacggctgctcaggtattccatctggtattcccacatgtcggcgtccagcggccagccgtggctgaacagcacgggtttaccgctgccccagtctttgaaatagatctgggtaccgtctttggcgacgaatgtgctcatggaaaactccttgggtcgagggaaaaggctcggcatcactattggtgtaaagcgtacgtcgagcttgtacgggtgtgcttggttggggttaccagctgaatttcagctcgacccccaggtaattgctgtcgtcgcccccggcatcgcgcagggtctgccccacgtcgtagtgcacggcctcgacggcgccggtgaggttggggctgaacacatagtcggtgcgcacttgcgcataggcaccggtccagcgatcgccctggcctgcggtgccggccaccggcaggttgggctgggtgtagaccgcatcgctggtggtttggcgccacagcaggccgatggcggtttgcacgctgagcttgtcgatcggcttgagcgtgatcgacggcttgacgtgaatcaggttgctgtagccggtgtagcccgccagggaaaagtagtagccgttggggaacagcgggttgaaggtgccgacggtgccatccccggttttgcggtcgcccgaggcgatgtccagttgcaggccgatgcgcggcttccaggccacgctgtcgaaggtgtagccggtacggctgccaccggcccaggcgcgaatgtccttgttgccgaccgagccgctttgcagcatcgcttcgatgtcccagtcaaagcccatggccgagccgccaaggcgtgcgtcgaacagatggcgggtctcgtcgccgtcggcgtccaggtaatgggcggcggtgcgctcatacacgccgtagtaggcggacaactcgttcttgccacccaccagtcgctccacgcggaccatgtggaagcgcgcatcgctgttggatttgtcgtcgaagtgacgcccgtcctgatactgcaccggctggctggcgatcccgataaaacgccagttggaggtctcccaatcgacccacagcgcatcgaaggactgccgcacattcgggccgtcccgcgatgagatgaagcgctgcaggtcgaaggcgaaatcctggcgcccggcacgcgccttgagggtgccgctgctgaaggtattcacatactcggcgaaggccaggcgcagatcgacgcggttctggtcggcgccgccgatcgtcgtcttgtcgtacgcccgcacatcttccaattgggtgaacacccgccagtgctcgttcagatgcaggtcggcgtggacctggaagcgttggatcaagtagcgatcacgcttcatatcccgcacgccgaagccactggcatcgttcatctcgaaacgctcgcgcaacgtcgcgcccagggacaggtaggtgtaggggtttgcgctggacagcgggatgtacttcaagctgtccagcggctgcgtgcgcagcgccgggtcccgcagcaccgaccagtcttcctgccagcggttggccttgatggccgggcgtgtcgcttgctcgtcggcgtggacgctgccgacgagcagcggccacagcacggccaggccccagcctgtgcgacgcgtcattttgcggcgttgagttgatggatctccgcgacgtagccgcccggaaactccaccaacgcactgcgacggcctttgctgtcgaacgcaggcaccaagactttggcgccggagccggtggccttgcccagggtggccgtcaggtcagccacttgatagccggtggtctcgtggccgaacgggtagggcagttggccgttggtgaccagcaccgccatgcgcccgaacggcgattcgatgtcgacgcgacggtagttaccgttggcttggccgatatctgcacctggggcgtgtttgtcatccgccaggactttgccgtgggcgaagcnggatgtnnnnnnnnnnnnnnnnnnnnnncagcggctngacgcccgtcctgatactgcaccggctggctggcgatcccgataaaacgccagttggaggtctcccaatcgacccacagcgcatcgaaggactgccgcacattcgggccgtcccgcgatgagatgaagcgctgcaggtcgaaggcgaaatcctggcgcccggcacgcgccttgagggtgccgctgctgaaggtattcacatactcggcgaaggccaggcgcagatcgacgcggttctggtcggcgccgccgatcgtcgtcttgtcgtacgcccgcacatcttccaattgggtgaacacccgccagtgctcgttcagatgcaggtcggcgtggacctggaagcgttggatcaagtagcgatcacgcttcatatcccgcacgccgaagccactggcatcgttcatctcgaaacgctcgcgcaacgtcgcgcccagggacaggtaggtgtaggggtttgcgctggacagcgggatgtacttcaagctgtccagcggctgcgtgcgcagcgccgggtcccgcagcaccgaccagtcttcctgccagcggttggccttgatggccgggcgtgtcgcttgctcgtcggcgtggacgctgccgacgagcagcggccacagcacggccaggccccagcctgtgcgacgcgtcattttgcggcgttgagttgatggatctccgcgacgtagccgcccggaaactccaccaacgcactgcgacggcctttgctgtcgaacgcaggcaccaagactttggcgccggagccggtggccttgcccagggtggccgtcaggtcagccacttgatagccggtggtctcgtggccgaacgggtagggcagttggccgttggtgaccagcaccgccatgcgcccgaacggcgattcgatgtcgacgcgacggtagttaccgttggcttggccgatatctgcacctggggcgtgtttgtcatccgccaggactttgccgtgggcgaagccgataaacgctttgataaaggtgtcggcacggtcggcactgaggtacacgcggttttccggcacggtctggaacgcggcgtaatccggggtcttggtgtgccagtaaagctgcatgttcacgccgcctggccactgcaccacggcgtcacgcccgatcgggtcgggaaagttgctgacgatcaccgccgcgccgttctcccgggcggccttgagggcgaggtccatgtccttgaccagatagccgttgcgctcctggccgaacgggtgcgggatcggcgtggtgaaaccgaacagcgataccgtgccggcgggggtctgtagcagttgcgaagtggtgctgctgggcaccggcagcacgttcaccaccacctggggcgtgcttttaccgccgaaggtggccaggaaactctgggcaaagcggtcgacatcggccggagcgacgtagacgtggctggtgtcgtattgcggggccacggcgaccgcaggcgttgcggcgaaggcgctgttcatcattgccccggccagcaaggtgactgccagcgataccgtcctgacttttctacacatacccactctcccgcgttttgagaaagtctcgatcttaggggcggggcagaccggcggattgtacggacgtgctcggttgaacgattcagcgtctatgctggtcatcgtagaacggtgtcatccaggaggctcaggacatgctcgacttctgcgccaggcacgggattgtctcggacatcgagatgatcgatatccagggcatcaacgaggcgtatgaacggaggctcaagggcgatgtgaagtatcggttcgtgatcgatatggacagcttgaaaaaggaaagcccggcggcttgaaatgcattctccaaaccgctgtagaacacctgtgggagggggcttgcccccgatagcagtcgggcagtcaccgcatcattgactgacccgccgctatcgggggcgagccccctcccacattggtttgcggtgtgtctagaccgagaggtgttcgtacagaattgtcgctcccaccagcatcagcaccacaccaccgaccatctccgcacgcttgcccaccaccgttcccagtactcggccaagcatcatcccgatcgtcaccatggtcatggtcgccaggccgatcgccgccgccgccaccaggatgtttacgtctacgaacgccaggcccacgcccaccgccagcgcatcgatgctggtggcgaaggctgtgacggcgaggatcatgaatgagtgctgggtcggcttctcggcctcttcatcatcggctttgagcccgttccagatcatgtgcagccccagcccgaccaacagcgtaaacgcgatccagtggtcccagtcttccacccagcgcgtggcggcgtggccgatggcccagccgatcatcggcgtgatggcttcgatcacaccaaagatcaggccggcgcgcagggcttcggtgagtcgcggtttgtgcaggctggagcctttgccgatggcggccgcaaaggcgtccgtggacatggccagggcgagaagaatcagggaaatggggttcacggtaaggcttccagtcgggctatgggacacaacgacactcccacgcgcccgacttgaggcatggaggtgtcgctggtctcaccaaccgaaaagacggtgttcgcaccacggcaggttgccgaatatgttgatacgaacgcttccaacagggtcagaagccggttactccccaacgaggtggacgatgttaggcgactgggtatgaaaattccgtcaaaaggcctgtggcaagccctctcgccacaggggacttatcgcccgttttgaaaggactggccctcaaggccgctgcggcttcaccgacgtgccgaaggtattgcccatgcgcacgctggtcgccgccggggtggataggcccaccgcgttcggcgggcgtttttcgatggggaggttctgcgcctcgcggttctttttggccgccttggttgcgttcgtgtcgttgcccatctgctggctcaggcagccatagtcgggggccttgtagccgtccacgctgacctcggcgcacttgccggcggcgttttcggcatgggccagcaagggcagggcagcgcacagcaacaggctggcaagggtcggcaaggttttcatcgggcctcctggcgggcccgaaggagtgggccggtaaggcttggaagtctagtgcagcgggcctctcatcaccgtgatgttttttttgctatcaccgtaacatcaggttcataaactggcctcaggatgacggttttctagggcgcgtcggccgtgcagcgatgcagaacagggggtgaacacggagcctggaggcgcttgatgtgcgccctggtcttgctgttgctgctggccggtggtcgcgcggcgcaggcagagtcaccgctgctgccgttgaacctgccggcgcaggacctggaacatgcactgcaagcctacagccgtgccaccgggatggcggtgctggtggaccgtgaattgacgcgcgggcggcgctccatcgcagtgcgcgggcgcttcacggcgcaagaagcactggcgatattgctgacagggagtggcctgatggcccgttatgcacgcagcgatgcgtttaccttgcagaccccgcaagttagcccaccgcccacgacccggggggcggcggcacgcaacgcggcgcggatcaacaacagttatgcgacggcgttgcagcaagccatcgagaccagcctgtgccgctcgccgctgacccggcccggcagttttcgcgcgctggtgcaggtgtgggtcaacccggatgggctgatcgaacacagccggttggtgagttccaccggcgacgaacaacgcgatgaagcactggtgcgcagcctggcagcggcacgggttgaacgcccggcgccgagctcgctgcgccaaccggtgactttacttttgatgcctgacacaacaggaacgcgcatggaatgcacagccgcaaaaggagcctcggagggatgaaaaataccgggcacagtacgatggtcagcctgttcctggcctcttacgaagacttcaaggtgcggttgcgcaagcgcctgggctcggaggacctggccaacgacgtgctgcacgagacctacctgcgggtcgaccgcatggacgtgccgccgaacctgcaacagcccaatgcctacctgtaccgcatggccctgaacatcgccgccgaccgccgccaggccgacgcgcgcctgctcaccggcagcgaggtggaagagctgctgcaaagcgccgacgaagcccaggacccctcgcgggtagtgggcggccagaaagaaatccaatccctggtcaaggcgctctacgaattgcccgcgcgccggcgcaagatcctcatcgccgcgcgcctggaagaggcgccgcacctggaaatctcccagcgtttcggtatttccacgcgcatggtcgaaaaggaaatcaaggccgccctgggccactgtgccaagcgcctggaaagaaaagtgattcagcggttcggtcccggggccggaaaaccgtcttagtgtcgagtccctgataaatccgtgagtacgtgcgcgcttgaatatttttagcctctccaccgcccggcagtccgccgccagccccctgcacgatgaagcccgcgactggctgctcctgctgacctcgggccgcgccaccgtggccgatgccaaggccctcaaagcctggtgcgcgcagagcccggagcatgcccaggctttcgagcaggccaaggtgctgtggcaacaactggcgccggcgcttgatcaagtgtcgcaaccgcgcagctttggccgccgtgccttcctcggcggcgccatcgctgcgtcggcagccgtggtgatggtgcgggtcggtgtaccgggtggctttgccgggctcacagcggactatcgcaccgaagtcggcgagcaacgccaagtgctgttgagtcaaggtatcagcctggaactcaacacccagacccgcatcagccgggtgggtgaaggcatcgaattgctcgaaggcgaagtcgaggtggtcacccacgttgcgcaaccgctgcgggtccaggccggtgaaggctcggtcagcgcggtgcaggcacgcttcaatgtgcgcaataccgaccaccgggtatgcgtcacctgcatcgacggttcactttcggtggacatcgccgggcgcagcgtgcgcctggacagcggccggcaactcacctacggcgcggccggtgtcagcgaggtgacaacggtggacacccaggcggtggtggcctggcgtgaacaggtgctggtgttcaacaacgccacgctggcgacggtggtggacgagatcaaccgttatcgcccgggcatgctgctgctgttgaacagggaactgggccagcgccgggttcaggcacgcttcagtttgcagcagttggcgggcgtggcgttgttgatccgcgatgcgtacggggccaagtgcacggagttgccgggtggggtggtgttgttgagttgaggggctgccgctcgtcgggtaactccaatttttacgatgtaaatggaccgggccagaacgctaatctacgcctgtcgctttcaggtatgcctgtgtgctcatgggttgagccaccggtctttttcctctgacagatctcctttcttgtcctctctgaattgtcattctcgtttgtaggggaaaggactttcagcgtaagaaaaaaccaggaaatgtacgtttcaagtctcacttcctatccggtttcttccttcgactgacattgttcggaagcatctgacagccctccaacggctgtgtgacagacagggcgacgccctcaggaacgccgaattttttgtaacctttcctgttttccttaagcgtttcagcctcggcagcatgggtgctctttccatttgagtacctgtgtgagggtgaaaggatgccggctgtttttcgacctgcgctgctggggatagcgctgttttcagggccgcttcttgccgcgtcccccgcgtcccccggcgaccgcgaattggcccgtgagcgtcagcagcaagtgttggaagagcagcgtcgtcgccttgaagacctgcagaacctgcccggccaaatcgctgtgccaacggctcccgcgctgctggaagacggccagtgcatcaccgtcacgcgtatcaacattgaaggcgcgacattgctgcccgaaggccagcgagaggcgctgctgcaaccctggcaggggcgttgcctgggggtgcctcaactcaacgccgtgctcaaaagcctcaccgatcactacctgcatcgcggctacgtcaccacccgcgcctacctgccacagcaggacctgaaacatggcgaactgaacatcatcgtggtcgaagggcgccttgaagggctcgacagctcatcgctggccagcccgctggagtccgccatgacctttcccggcaccgtaggggaggtgctcgacctgcgcgagctggagcagtgggtggatcaactgtcgcgcttgccctcgcgccagccgcagcttgaggtgttgccggggcaggcagtggggggcagccgcgtgacgctcaaaggtgagcgccgcgaaccctggcgtgtctcggccaaccgcaacaaccatggcgatgccagcaccggtcgccagcaggccggtatcggcctggattgggacagccccctgggcctggcggatcaattgaacctgcgggccagccgcgacaccgtcagcgaccgctggcgccattcccacagccagaacctgttctacagcctgccgtatggttggtggacgttcaatgtcagccacagccaaagcttctaccgcacgcgcaacgacctttccgggtttgccttcgcactgtcaggcgagacgtccagccagcagttgcgcgccgagcgcgtgctgcaccgcgataacctgggcaagacggcgttcagctttggcctgagccacctgcggacccgcaactacctggaagacgcgttgctgcgcacctccagccatcgcaccacggagcgtcaactgggcttcaaccatggccgccgcatcggcaacgcctttctcaacctcgatgccggctggcaacagggcatcggcgccctggacgcccagcgcgatctctctacacagcgcggcgcgccgacctcgcgctatcagaaatacaccctgaccctcagctatttgcaggcctttcgctggctgggccagcactggagtgtcgacagccttgccaccggccaacacgccgaagacgaactctatgggccacaacgcctgagcgtcggcggcctcggtgcggtgcgcgggttccagcaacagaacctttcgggcaatagcggcggctactggcgcagccaggtgcgctggcgccaaccggtggcctgggaggcgctgcggccctgggtgcacgaagtgggcgtgggctttggctacgacgtcggagtgatccgccgtggcccgcacaaccctgaagtcgccgggcgccttaccggccatgcctgggaactcagcgcacggggtactcaccttgcggcttcgctggtgcttgcccgttccctggaacgcccggccatcgttgagcgtcgcgaacacccggtctacgcccgaatcgacctgtttttctgaataacaacaaggaacctagcctatggacgtgcgccgcccgttttaccagtgtctggccctgagcctcacaggcatcatcttcctcaacccgattgtcgcggccgccgccgagctgagcgtggacccggccagccccggcaccagcctcggccatgcgcccaacggcgtgccggtagtgaatatcgccgggcccaatggcagcgggctgtcccataacctgttcaccgactacaacgtcggcagcaacgggctgatcctcaataacgccacccaggccacgcaaaacaccgagctcggcggtgtgatcctcggcaacccaggcctgcaagggcggcctgccagcgtgatcctcaacgaagtcaccggtggcaaccgcagccacttggggggctacaccgaagtggccgggcatgccgcgcgggtgatcgtcgccaatcctcacggcatcacctgcaatggctgcgggtttatcaatacgccgcgcgcgacgctgaccaccggcaagcccgtgatcgaaggtgggcggctggatcactttcgcgtagacggcggcgatattgcgctggagggcgccgggctcaatgcccgcaatgtcagccagttcgatctgatcacccgcacggccaagctcaacgcgcaactgcatgccgaccagctcaacattatcaccggccgtaacgatgtcagtgccgacactttgcaggcccgtgcccatgcggaagatggccgggacaaaccgcaactggccatcgatgccagcgccctcggcggcatgtacgccgggacgattcgcctggtgggcactgagcagggtgttggcgtaaggctggcgggcgatatggccagcaccgccggcgacatcgtgatcaatgccaatggcggcctgagcctgtcccacaccaccagcgtcggcgccctcaccgccaaggccgagtcgatcgacttacagggcccgacctttgcgatggctgatatcgacctgcagacccagggcgatctggtggtgcggcagagcctggccagcgccgggaatgtcagcctcgaaggccgcacggtgagcaaccagggcaaggtcgtcagcggcatcctggaagaccggcgtatcgcgggcaaacagctgagcatcaaagcccagcgcctggataacccgggtgaactcaatgccagtggccacctggaaatcaccagcggcagcctcgataacagcggccagatcgccgccgacagcgccaggatcgaagcccgccaggacctgagaaacactggccaggtggtcaccgccggccaacttgaaattgccgccagacaggccatcaaccatgccgggacgctgcatgccgaaggcgatttgagcctggtcgccgacagcgtcgacaacagcggcaagatcgtgggggcgggcagtgcgctgagtattgcggccggcacgttcaccaacgcgggcgaactgctcggcgacaaccacctgcacctgcaggtcgatggcgacctgaacaacagcggcctgatcgccgccaaaggcgatgcctatatcagcgcatcaaaccttacccaagaccacggccagattctcagcggccaagacatccaactgcgcgtgcgcgatgtactgcataacctcggcgtgctcagcgcagcgcggcatatgcagattaatgcggctcaactgaataaccccggcacgctcggcagccaaggcaacctcctgctcactgccaacgtcaccaacagcggcctgctgttcagcggcggcgacctgcatgtgcgtggcgagcatttcagcaatcttgaaggtgacctctacagcgtcggtgatttcagtttcgccggcacgcgcttcagcaacctctccggcaacgtggaaaccgaaggcaacctgcacatcaacgcccgcgagtttgaaaacgcccgcacccaccttgtcctcgaacgcgagctggtcggcggtagtatccaatgggtctgcggccagcactgccacggcaacgacagcttcaagcgcggcactatctacatcagcgaaatctggcgcgaaaccgccgcgcccaactccaccagggcggcgcgactggtggccggcaaagacctgcgcatcgacgcgcagaccctggagaaccgctacagcctgctcgccgccaatggcgacgtgcacctttccgccaaccgccttatcaaccagggcgcggcctcccagaccggcatctccagcaccatcatcggcacccccggtcgcatcgacaaagccctgtgggaccagatggaattccacgacctgccggccttcaataacgcacccttcgaccccgtgcgttttgccgaactcaaggcccgctcgaccggagaggggttcagcaaccccggcaccctcaccacctggcgcgaggatggccgcgaagtctatgccgccacgctgcaagccggcggccgcctcaacctgcaggccaccgagtacctgcaaaacggcaccctgcgggaaaacaccctggcgcaactgaccggcgacattggccacaaccccaacgacctcgaactgagccccgatcgcctcagcgatgacctgacccaaccacccgaattccaactccccagcggtaaatacggactgtttatccccagcaagaatccgggcagcccctacctgattgaaaccaatcccctgttcacccacctggccaacttcctcagttcccagtacttgctcgacaagatcggctacagcagcgacgaagcctggcggcgcctgggcgacggctactacgaaagccgcctgatccgtgacgccgtgctggcgaagaccgggcaacgcttcctcgccgggcagcagagcgacgaggaacagttccgctacctgatggacaacggtctcagcgcccgtgacagcctgcaattgagcgtcggcgtaggccttaccgcgcagcaggtggcggccctgacccacgacatcgtgtggatggaaaaacgccaggtgcagggtgaagacgtgctggtgccggtgctgtacctggcgacggtcgacgccaataacctgcgcgggggcagcctggtgcaaggccgggacatcaacctggtcagcggcggcgacatcgtcagtgtcggcaccttgaaagcggaacgggagctgaccgccgtcaccgacggccgcctgctcaatggcggcacgctcagcgccggtgaacgcatcagcctgctggccaccgacagtatccgcaacgcgatggccggcgagatccgtggcagctatatcgaacttaccagcgtcactggcgacatcgtcaacgaccgcaccgcccatgccaagcatcagggcgacggcacccttgtcacccatctcgaccaggcgggccagatcagcgccgcacagcgcctcacgctcaacgccggacgcgacatcaccaaccgaggcgacatcaacagcgctggcgatgccagcctgagcgccgggcgcgacatcaacctcatcgccgtcaccgacacccaacaggtgcgcaccacggaaaacggcggccaccgggtcacccaacacagccgcaccgaacagcttggcgccaacctcaacgccgccggcagcctgagcctgcacgccgggcgcgacatcaccctattggccagccaagccaacgccggcaaagacctgaccgtcgccgccggtggcaacctccacctgttggccgctgccaacgacaccgatcacgcggtcaacagcaaacgcggcggcgccaaggtgcatgagcaaaccacccaggtgcgtcacgtgggcagccagctcaccgccggcggccaactgagcgccagcgcggggcaagacatcgtgctgcacgccagccaggtcaacagcgccaaggacgcgtatctggtggcgggtgggcagttgcaactgctgagtgccaatgacagcgactacagcctgtatgactacaagaaaaaaagcagcttcggcgccctcaagacccaacgcgacgaagtcaccgacgtgcgtgcggtgggcagccagatcaccacaggcggcaacctcaacctgatcagcggcggcgatcagctgtatcaaggggcaaggctggaaagcgcggcggatatcgccatcaccagtggtggggcggtgaccttcgaagcagtgaaggacctgcatcaggagagccacgagaagaccaacaacaccgcattctgggtggcatccaagggcaagggcagcactgacgaaacgctgcgtcagagccagttggttgccgggggcaccatcgcgatccaggccgtcgacggtttgcagatcgacatcaagcaggtcaatcagcagagcgtcagccagtcgattgatgcgatggtcaaggccgacccgcaattggcttggctcaaggacgcagaacagcgcggggatgtggactggcgtcaggtcagggaagtccacgacagcttcaagtacagccactccgggctggggccggcctcgcaactgatcattgccatcgtgatgtcggcggtcatcgggcccatggcgacggccgcagcaggcggcggtgtcggcggcgccatggtgggagcggttgcgaccggcgcctcgaccaatgccagtgtcagcgtggtcaacaaccggggcaatctcggtgccgtgttcaaagacgtgacgtcgtccgatgccctgaagggctatggggtttcggcgatcactgccggcttgacggtgggttacttcgacccgtggaccggagcgcagacccataccaccatcagcaaggtggccacctccggctcgctgggcacctggagcggcgtcggccaattcgcggccaaccaggcgctgcagaacggcacctctgtgttgctgaacaaagccctggggcagggcggcagtgtcagtgacgcgctgaaaaatgccttgttcaacaccttggcggcggccagtttcaacctggtaggggactacacgaaaaacgtcctggcggacggctcgttacccaaggtggcgatccacgccatggtcggtggcttgctggcagaagccactggcggcgacttcaagaccggcgcattggcggcggcggcaagcgaagcactggttggccacctggatacgttggtcaaaggcaacgacaccctgctcaccatgagttcgcagatcgtcggcgtactggcggctgcggcacaaagcgacaccgacgccgccaagctggagaccggcagctgggtggcgaagaacgccacgcaatacaactacctgtcacacaaccaactggaacgggccgccaaacagatagcccgatgcaccgacgcctcctgcattcaggacgccacgcgcaaattccaggaactgagcctccagcaggacattgacgccatcgtcagctgccaggccgaccccagctcctgcgcggcaagctccaaagaagtcgccaacaccatggcgaacctcaacgccatccgcgacatcgccgactacgcctcgcccgacgcccgggaggcggtacagagcctgatcaacggcaattacgaatttcaggaaatgctggcgaccgccacgaccgagcactcggtgggcgcgatggtcgagtcgctcaagtcgaagtgggcactgagcgatgctcaggcgcaggacattgcgcacaatctgaagatcgcactggcggttggggtggggactgcggcgggggtggtggcttataggcgggctgtggcgggtgggggggcgaaaggtgaagctgctgggttactgccaaagcctggaagcacatctctacccgtcaatagcttcggggctgatgccgattttaaggtggactcgaaccagctaggtacaaaactcggtaaacatgttaaagactatggtgggaatgcggccaattcagccgatcggaaaatggtgcttgatcaaattaatgatattgggaataacccagataaagttatccctggaactttttccggacaaggaacaaatggtacgcgtggagatgtattcttcaggatcaaaggtaatgatgttgttgttaccaagcctgacggaacgtttgtgactatcttgaaagatggggtgactcagaatacatctgtaaaaagtgctttgaagggggaagtaaggtaatgagtatttcatatcttatgaatgcttggttagtgagggcgttaggacgtaagctgctttcagtaaatgcattgcttcatgtgttcgagtcttatagaggctcgatccctcaagaggtttctcttcgatttgaagatttggagagtgggaggctatattgcgggagtgatggtgtgtcgctatgtttttctgaagcgcctattgctgaatgcgatttgggtgagtacggaaaattgattgatttttgtgtttctagtggaagttatttttttgatgttgtcgggcttagattgctttcggtctcggctataaagtcctcggtagaatgtaaagtgataggcgttttattgttgtttgaatatgactcgtttctatcaattttgaatttaggggatgagctctttttttgtgatagggtgccagatgaaataattgccagcgaagggttgacgtttgttttgttgggcggaaaagggggggaggaaaacggggtcagaccctgagggactctagatgcttatcgctctggcagtgcagttgttttaggcaaaaatgcccaaggttttcctgtcgttcgagtcgaaggcgtaaccgggacaaatgtaaatattggagcggggataaacagtcagccaacaaatgtttttgtaatcaaaggaacgaaaagccctagtattgttcctacaagtcctaatcctaaattggtggaatagtatggatgtaattcttagaaatcaaataattgtcgcattgatgcaggcgctgttaggcgcaatttcccctaattttagagccgttataattgatttttcgcagggggtggatgtaaggtttttcttggttgaagatttaattgaagatgttgatgaaatcgatgatgtaattacagagcttgactcgctcgtaatggctattaaggcgctgccaataaagtactgtattgctgtgggagaagaaaggatcagcttttctggtgataacgtgattccgatttatattaggcgcgagtaattggtgcaaatggaatttcaattacgattgaatcaaagattgccgatcaaatgggtaaacggggtcgaacggaaagctctatacagtctgtaattgatcgggtaaacggggtcagacccagagcgggtaaacggggtcagacccagagggatcctcatggcgtctttagtatggacagaaaagagattttaggcgctgtcgatgaggcatggctcaagaaaggtagtcctgtagtcggggatccgggtgcatatgttgtcccgatgggccgagcgattgggacttcgggagaaacgagtattaaaattattgttcggcctgggaccagtcaggacattaccgcctatactgttaaatagagaagttttatatgttgtgtccaaggtgtgagcagggagatattgtcaaggctaaagttatagctgacgacagtagcttgttcgtatgtcaagagtgcgaggcctcatggtttttatacgaagatattggggtcagggaatttttcgactatggggcttatatggaaagtgtagggctgaaaccattatggagtgagttgataattattcctgagtagttgcaaaagccacagcggacttttaccgccggctcggcttcagcatatttggagaactcaaagattacccggtcgctggatacaatcggttttttatgcagaaaagatttggtctcgacaagcataacgctagtcgtactcagccttgaggcaatgacagcaaaaatctaagcaaggtgtgttacccgcgatcgatcgtcgccattcctttccagaagaacacgcaggacgtggtgcatgccttgacccgcagtaccctggaagaagcggtgcaacgccgattgttgtaatgcgtggtcaagtcagttcaacccgaacgtcgatcagccgtgaccggcgttcagcttcctatcaagtcgtaagaattgttcccggtaatatgtaggtcatttcgttttatgcttttccagtccttccaggcacctgctgtttcatccctgcactgttttatagttcacggagcaatccaccacggcagggagccgccccctcatgcatacccggaaaaaatccccccggcgccacaacccacaacccccgacccttcattccggccatcgcctgcgtctggtgctcaacacctacggcattccgcccacggcctttgccgaatggatgcgcgtcagcccgcagtgcctcaacaattggttttcacgcgggctgccggtggatcgcgtggagaaactggcgacaaccttgagcgtcagcaaagtgtggcttgagaccggcgagcgcggactatgacagtggcggggcggccaattcgccgcccctacttcaacggtcccaccacctgccggtatttttccactccctgtggcgtctgccgcaccaggctgatctccagtcccagcgggtcttcacggcgattgccactcaactgccgccaacctttgtccgcttcccatacgcgtacctgcaggtcactgacgccggtcagcaccaccacgccgtcctttgccgccggcagcgggtagcggtcccgcgcgggggcggcagcgcggtagagtgcgtcgcccttgagccaccaacgcacccgttgcaggccatcgccggccgctggggcgctgcggatcacgtccaggcgaaagcccttgctgtcggagctgcgcacggtcacggcggccagtccctctgtttgggtggcttgcgggggcgtcagttcgacactggcacgcaggcttatatcccgttgcatctggttcagcgcgcgcagcaacacttcggtctgttcggtgcttgcctgcaaatgctgatcggcgcgggtgacgctgtccagtccgcgccaggcgatcaggctgaccacggccatgagcatgatcgccaccatcacttcgatcagggtaaagccttgctgggatctgttcatggttgactcactacgcgcatcaagccggcggcgtcgcgttgcaggctgaggctgtgttggccgtcggacagcaccacacgcagcggtgggttgatccattcagcgttgagcaccagggtttgccggggttcgagacggatctgcatcggcgtgctttcccacaggcgtgggcgcagctggtcgtcgtgtttaaaggtgtcgaggccctggccgtcgtcccgctggcggttgaagcgaaagcccttggcatccgcgcgccaggtgatggggcggccgtcggcgtgggcttcggcctgggcgacttgcagcagttggctcaggcgctcggcatccttgcgcaacaggtgcagcgggtcgggcttgatggtgaggctgatggcggcgctggcgatgccgatgatcaccagcaccaccatcagctcgatcagggtgaagccttgctgtttcatcgcgggctacctggagaactggggagtgtgtgaaataaaagcgtgcgaattgacctgtaggctggtgcgacggacaaacaggaggtcctccccatgacatttgcccctcgtttcaccctggcccacggtgtgcaggctgtgggtgtgctggccgcgctggcgggtgtggcggtatggacgccgctgctactcaccagcgccgaatcccacaccccgcaagccacgccccaggcactggcggcgcgcagtgataacccggcgctgcaatggttttccaatgtgccgacggcgttgcaggtcaaggtcaccggcgtactggcgggagcgcggggcgcggtggcgatcctcagtctgaatgacggcccgccgcgcagctttctgctgggtgaacggctcagccccggtgtgcggctcacggccattgagggcgacggggtggagatcgagcgcggcggcgagaagctgcgcgtcaacctcgacaagttgccgccggggcctgcgttgccgctgctcactcggccatgacctgggtgtccagccgcgccaggggcggcgcttcgcggctggcgtcgagcacttgcaggttgacctggaacaggcggccgtcggcgttgatggtctgctcgcagcgcagtttcaggcggccttgatcgcaagtgacgatctgcttgccgctgcgcaggtggccttccaggcgcagttcggcgaggcgactctgcgccgccagcaacgcgatggatttgtctcgcagcaggccgttgctctgggtcatcaacccggccacgcgcacggcggcggccatggccacggcgatgatcgccagcgccaccagcacttcgatcagggtaaaaccttgctccttgcgacggccgtacatggcgctctcaaagccgggaaacaggcccgcagactagcgccggcagttgaccgattggcgactgaaactcccgaggattttcaatacgactgacatgtgttcttgcaacactgcgccacgaattgcactcaagccaaggaatgtcgagatggatatcgcgcgcctaacgtccccattgccaggccctcgcgggcagcgtggcttcaccctgatcgaaatcatggtggtggtggtcatcctcgggatcctcgccgcgatggtggtgcccaaggtcctggatcgcccggaccaggcgcgggccacggcggccaaacaggacatcggcgggttgatgcaggcgctgaagctctatcgcctcgatcacggcacgtacccgagcatgaaccagggcctcaaggtgttggtggagcgcccggcggacgccaagaacagcaactggcgcgcctacctggaccgcctgcccaacgacccatggggccacccttatcactacctcaacccgggcgccaatggtgaggtggacgtgttctccctcggcgccgacggccaaccggatggcgatggcgtgaatgccgatatcggctcctggcagctctaaggcccgccatgaaacggtattcgcccccagtggcgaagcagcgcggcatggcgattatcagcgccttgctgatcgcagcagtggtggcggtactggccggcgccatgctcacgcgccagaccgtatttacccgcagcctcgaagccgaacagctgcgcatccagggccaatggttgttgcagggcggcctggagcgcagccgacagctgctctgggacgcgcgccagaaggacgtgctgacccgtcttgatcaaccctgggcgcgggcccaagggggggccttcgaggggcggatcgaggacgaacagggcaagttcaacctgcgcaacctggtcagccgcgagcaggtggacactgagcaattgcagagcttcgaacggctgtgccgcctgatcggtgtcgacccgacggtgagtcggcgcatcagtcagcgggtgatcgcatcttatgaaccacccgccaaatacccgatgctgcgcagcctggatgagttgagcgggatcgaaggcctcgaccccctcgtgctgcagcgcatgcaggcctatatcagcgtgctgccgggcccgacctgggtcaacggcaacaccgccagcgccgaagtgctcagtgcagtggtgccccagctcagcctggcccaagcccatgggttggtggccgagcgtgacagcgggcagtggtttatcaaccggggtgacttcgtcaaccgcctgcacttgccgcaagtggcggtggattcggtgcaggtgggcattaccagcgagtggttccgcgtgcagggccaggcgcggcgcgagcagcggcgagtcacccttgacgccttgttgcaccgccctgaagaccgccagccacgggtgatctggtcgcgggtgggcgtatgaaacgcttgcgcattggcttgccgccgctggatcaattgagcgcgcagagccaggtccggttcgcctgggtggagcgaggcgcggtcattgaagagggcgacgccagcctggcgcagttgggccagtcgcgccaggcggcggactgcttcctgcatccacgggacagcctgctgaccagcctggagctgccgccattacccgcggcgaagaccgctgccgccgtggcttgtgccgcccaggcgttgatcctcggcgcggttgagcagatgcaggtcgcccacggcccgcgtgaaagcgatggccgcgtgcaggtggcctgggtacccaaagccgggctggagcggttggcgcagttgccactcaagctgcgcggcctgtacccggcgccctatgcactaccggtgggcgcggcagtgttggataacggctacctgctgacccgtgacagcctgcaacaaggcacggtgcacccgctggggttgcaggcgctggacctgccattggtggatgcggcgcagcgttggagcgggccggtgcccacatggggcttgcatggtcgcctcacacagccctcgaccggcggatggggcagggcactggcctgcgtggcgctggccatggccatctggaccctgggcctcaacctgtacgccgcccgccaggtggagcaaggccagcgactcaaggcgctgatgagccagcaggtgcgccaggcgtttccggcgttgccggtagtgctcaaccccttgcaacaggcccgccagcaattggccgcacgccagaccggcgcggccgccgacccgggccaacgcttcccgggcctgctgcaactggtgggaagcaacctgccgttcatggtcggcagtgtcgacagcctgacgtttgaacaggggcgcttgcgtgtcgagctgctcgccgacagccgtaacccgaccgtcgaaggtgaatggcaggcggcgttggcccaggccggtttcagcgccagccgcgatggccaggcctggaccattgctcccgcgcaagccgcagaaaaaaccggagccggcgatgaataaagtccagcgactgcgcagccaggcccgggtgttctggaacggcctggccctgcgcgaaaaacgcatgctcggcggcgccgggctggtcctggccagcctgttgacctggctggtgctggtgcagcccgcgttgaagaagatcgattactggcaagccgagacccccaagctgcgcgcccaggccgcagccttgcaggtgttgttgcaggacgtcgccgcgcccaggccgggtgacgaggccacattgcgccaggcgctggacagcgccgggctgcaagggcattaccagttgcaggcgctcgaacccggcggttggcgcctgaccttcgacaacgccccggccgatgcggtggtgggctggctgttgggcaatgcccgtttgttttccctggaggtgtccgaggcgcgtttgcagcgcgtgctcgataccgtcgacaactcggccggcactctgtccgggaccgttcgcatggatcaggcgcttggcgctaaggaagcttcatgaagtggtcagtcccccctttccgtatggttgcgccgctgctggtgctggccctgagtgcgtgcagcagccaggacgcgtccaagccgttgctggtggacagcgaactcggccaacccctggcggacacccgtcgcagtggcgagactgttctcgaccgccagagccaacccgcgcccaaagcgccggtacagcaccgcgtcaccaacagtgctcgcggccatgccccggcagctgtcaaggcacgcaacccgttgggtgaccagccggtgcaactcaattttgtcgacgccgacatccaggcggtggtacgtgcactgtcccgtgccaccggccagcagttcctggtggacccacgggtaaagggtaacctcaccctggtcagcgaaggccaggtaccggcgcatcaggcctacgacatgctgctggcggcgttgcgcatgcagggcttcagcgtggtcgatgtgggcggcgtcgcccaggtggtgcccgaggccgatgccaagctgctcggcgggccgatctacagtgccggcagcagcggcatgcagacccgcacgttccgtctgcaatacgaaaacgccgtcaacctgatcccggtgctgcgccccatcgtgtcgccgaacaacccgatcaacgcctaccccggcaacaacagcattgtgatcaccgactacgcggaaaacctggcgcgggtggcgcagatcatcaatggcatcgacacccccagcgccatcgacaccgacgtggtgatggtgcaaaacggcatcgccgtggacatcgccgccatggtctccgagttgctggacacccagggcgccgaccagacccaaaagatcaacgtgatcggcgacccgcgctccaactcgatcatcatccgctccggcagcccggagcggacggaactggcgcgcaacctgatctacaaactcgacaacgcccagagcaaccccagcaacatgcacgtggtgtacctgcgcaacgcccaggcgggcaagttggcccagtcattgcgtggcttgctcaccggcgagagcgattccggcgtgagcgacgatgcccgtggcaagctcagcgccatgggcggcaatggcaagaacaccgcccaaggcgcgagcaacgcgcaaaacagcagcggcacccccaccggcagcggcgtgcagtcgggttatggccaggccaccggttcgaccaccggcaccaacggcaccgccaaggatcaggacaccgcgttcagcgccggcggcgtgacgatccaggctgacgccaccaccaacaccctgctgatctccgcgccggacccgctgtaccgcaacctgcgcgaagtcatcgacatgctcgaccagcgtcgcgcccaagtggtgatcgaaagcctgatcgtggaggtcggcgaagacgacgccaccgaattcggcgtgcagtggcaggccggcaacctggggggcaagggtgggtttggtggcgtgaacctgggcggcagcggggtgaacagcgcgccgaccagcaagaccagcatcgatgtattgcccaagggcctcaacgtgggcctggtcaacggcaccgtggacattcccggcatcggcaaggtactcgaccttaaggtgttggcccgtgcgttgaagagcaagggcggcaccaacatattgtccacgcccaacctgctgaccctggacaacgaagcggcgagtatttttgtggggcagaccattccgtttgtcaccggcagttatgtgaccggcggcggaggcaccagcaacaacccgttccagacggtgcagcgtgaagaggtggggctcaagttgaacgtgcggccgcagatttccgagggcggtacggtgaaactggatatctaccaggaggtcagcacggtggatgcgcgggcgtcggtggaggcgggcacggtgaccaacaagcgggcgatcgataccagtattttgctggatgacgggcagatcatggtgctcggcgggttgctgcaggatgggtacagccagagcaatgatgcggtgccgtggttgtcggatattccggggttgggggcgttgtttcgcaatgagaagcgcagtgtgaacaagaccaacctgatggtgtttttgcggccgtacattattcgggacagtggggcggggcgcagtattacgttgaatcggtatgagtttatgcgcagggcgcaaggggggttgcagccggagcatagttgggcgatgccggatgtgcaggcgccgcagttgcctgcggtggagaaggcgattcctggtggccggccttgagcgttttgaccgtgtacatatctattccttcggtaacggcggcttatggttccgcccttacggcggctcacttttggaaaggcccaaaagtaagcaaaaggccttcgccccaccactcggcacctcgcctaggctcggtgtgccctcactccagcttgaatccgtgggccgccgccacgcgccatccatggcgcggggcggctaacccggcgtcctgccgggttacccacggattcaagcctgcgttcggccagcgtggttttacggggcgccgaagagcaagagcaagagcgactcgcttcgcatcgtggatacgttttttgttttgtgttgccgccctactgtggcgagcgggcttgccccgcgttgggctgcgaagcagccctaaaaccagtgtgagcgccgcgttcatcctggcttcccgcgtcatcgttaacgaccatcgcgggcaagcccggctcctacaggggaacacgttcgcttccacgactcggtcggctattcggccgccgcgctttgcttttgattttgatcttaggcgccccgtcaaacacgctggccggaattcggcagggatttggggggtaaaccggcagggatgccggtttagccgccccgcgccatggatggcgcgtgg

SEQ ID NO: 35 - DNA, 23376 bp, Pseudomonas nodulensis
gcttttgattttgatcttaggcgccccgtcaaacacgctggccggaattcggcagggatttggggggtaaaccggcagggatgccggtttagccgccccgcgccatggatggcgcgtggcggcggccccccaaatcactgtcggattacgggcacaccgagcctgggcgaggtgccgagtgttggggcaagagccctttgcttactttggggcttttccaaagtgagccgccgtaagggcggaaccctaagtagccgttaccgcagcaacggatatgtacacctacaaacagggccaaaaccatgagcctattgccctacgcctgggccaaatcccaacgcatcctcctgcgccccaccgaagcaggccacctgctgacggtgtgcccctcaacccccggctggtccatcagcgaagtccaccgccagttcggccaggcccagctcgaacaggtacgcgacgacgaactcgacggcctgctcaccgccgcctacgccgacaccggcagcgccgccgccgtggtgggcgccgccgaaaacgaggtcgacctcgaccgcctgatgcaagacatgcccgaagtcaccgacctgctcgacacccaggacggcgccccggtgatccgcatgatcaacgccttgctcacccaggccgcccgcgacgaagccagcgacatccatatcgaaccctacgaaacccattccgtggtgcgctaccgcgtcgacggcaccctgcgtgacgttgtttcgccgcgcaaggctctgcatggcgcactggtgtcgcgcatcaagatcatggcccaactcgatatcgccgaaaaacgcctgccccaggacgggcgcattgccctgcgcgtcgccgggcgtccgatcgacattcgcgtgtccacggtgcccaccggccatggcgaacgcgtcgtcatgcgcctgctggacaaacaagccgggcgcctgcagttggagaccctgggcatggagccgcagctgctcgcgcgcctggatacgctgatccgccagccccacggcatcgtgctggtcaccgggcctaccggcagtggcaagaccaccagcctgtacgccgccctggcgcggctggatgcgagtaccagcaacatccttaccgtggaagacccggtggagtacgacctgccgggcatcagccagatccaggtcaacgccaagatcgacatgaccttcggcctggccctgcgcgcgatcctgcgccaggacccggacatcatcatgatcggcgaaatccgtgacctggagaccgcacaaatcgccgtgcaggcttcgctcaccggtcacttggtgctggcgaccttgcacaccaacgacgcggtgtcggcggtcaaccgcctgatcgatatgggggtggagccgttcttgctggcgtcgtccctgctgggggtgttggcccagcgcctggtaaggcgcctgtgcccgcactgcaagcaggaagaccccgctgcgcccggcacctggcgcccggtgggctgcgcgcagtgcaaccaggtcggctacagcgggcgtaccggtatccatgagttgttctgtgtcgacgacgcggtgcgcagcctgatccacgagggtgccaacgagcaggacctgcgcctggccgcgcgccgcgccgggatgttgagcatgcgtgaagacggtgaacgctgggtgcgcagcgctgccaccgcccccgaagaaatcctgcgtgtgacacgggacgcctgatgaatcgctatcgctacgaggccgccgatgccagcggcaaagtcgaggccgggcatgtggaggctgacagccagagcgcagcctttgccaacctgcgcagtcgcggtttgaccgcgttgttggtgcagatcgaaggcaatcagctggccgcgacgggcagcagcctgttcagcgccaagctgtcggacaacgacctggcctgggccacgcggcaactggcgagcctgctgggcgcaagcctgccgttggaagccgcgctgagtgccacggtggagcaggccgagaaaaagcatatcgcccagaccctggcagccgtgcgcgccgatgtgcgtggcggcatgcgcctggcggatgcgttggcggcgcgacctcgggattttccgtcgatctaccgcgcgctgatcgcggcgggggaggagtccggtgacctggcccaggtgatggagcgtttggctgactacatcgaggaacgcaacaacctgcgtggcaagatcctcaccgcgtttatctaccccggcgtggtggggctggtgtccatcggcattgtgattttcttgctgagctatgtggtgccccaggtggtcagcgcgttctcccaggcacgccaggacctgccggggctgaccctggcgatgctcaacgcgagtgacttcatccgcgcctggggctggctgtgttttgccgggatcgtcggcgggttctggagctggcgcctgtacctgcgcaatcccgtggcgcgcctgaattggcacagccgtgtgctgcgcctgccattgatcgggcgttttgtactggggttgaacacggcacgattcgcctcgaccctggcgatcctcggcggtgccggcgtgccgttgctgcgtgccctggaggccgcgcggcaaaccttgtccaacgaccggctcgaccaatgcgtcagcgatgccaccgccaaggtgcgcgaaggcgtcaacctggccccggcgctggcggtggaaaaggtcttcccgccggtgctgatccacctgatcgccagcggcgagaaaaccggctcgctgccaccgatgctggagcgggcggcgcagacgctgtcgcgggatatcgaacggcgtgccatgggcatgaccgccttgctggagccgctgatgatcgtggtgatgggggccgtggtgctggtgatcgtcatggcggtgctgttgccgatcatcgagatcaaccaactcgtcacctgactgtgggagggggcttgcccccgattgcgcagagtcagtcactacatctttggctgacccactgcaatcgggggcaagccccctcccacatttgaactgtgtttattcaatgggtttttgtgcgcacctgatgctgccccgtccaacctcgggttcctcattccgtcacatcccgacagcccatgccgcctccagccaaacgcgctgaaacctcgctgtcacctgcgtccaaagcgctcggaatcatgaccaaaacacccgagaatctttttaaaaatcaaggtgttcctcccgaggttttttcctacaaacgtcatcggaaactgcgaatttctctcccatggttttcacccctggccacccccgcaagacggcttgggaccgaagccatggcgtcatgcaagagccatctaccccaaacgtacaaacacgacgaaaggagattcttcatgtttaagcgcaacgttctcgcggtatccatgaccctcgctgcactgtgctcggcccaggctgcaatggctgacatcaacggcggcggcgccactctgccagaaccgctgtacaagactgctggcgtactgactgccggttttgccgagtacatcggtgtcggcagcggcaatggcaagtcagctttcctgaacaacgactacaccaagttcgtcgccggtgtgaccaacaagaacgtgcattgggccggcagcgattccaaactttccgccgctgaactgctcgcttatcaaaacaccaagcaagccggttggggcaagctgatccaggtaccttcggtggccacttcggttgccattcctttcaacaagaccggtgccggtaacgtcaacctgaccgttgaccaactctgcggcgtctactcgggtcgtctgactacctgggaccagatcaccccaggccttaccggtaccatccaagtggcttaccgtaaaggcgccagcggcacgaccgagctgttcacccgtttcctcaatgccaagtgcaacccgacattggaaaacggtactttcgccgtgacccagactttcgaaagcagcttctcccgtggcctgccagcgggtgcaatcaaccctctgcaagaagtcaacccagccagcactaccacgcctaaagaaaccttcaaggacaccagtgaaggtgtgatgggcttgctgaacaacgctcagaaccgcatcacctacatgagcccggactgggctgcaaccagcgtcgccggcctgggtgacgcaaccaaagtcgccacgatcggtggtgtttcgcctgcacctgccaacgtttcggccgcgatcaacgcgatccagccgccagccgtcgccagccgtggcgaccagaacgtctgggtgcctgtgttcgcagcgactaccaaccccaacgacgccagcgtcgtgcaatacccaagcaccggctacccaatcctgggcttcactaacctgatcttcagccagtgctatgccaacgctgatcaaaccacccaagtgcgtgcgttcttctccaagcactacggcgctttgtccaacaacgacacggcgatcaccaacaaccgcttcgtaccgctgccagccagctggaaaaccgctgtgcgtgacaccttcgtcaccgcgtccaacggtttgagcatcggcaacacctctgtttgcaaccaaatcggtcgtccgctgtaacccacgtttcaacgacccgcgacaccgatcagcaacggcctgtgccgttgctgatttttttgcgttaacagccccatgtgaactttccatgacagaagttcagtcccgtgcctcgacaaccgcctactcctcatacgtgagcctgtcttgctgcctgtgcgcagacaaatgtgtgatgacaaagaaggaagactccagatggtccgctgcaaatcaccggttaacctgaaagcccaagagactatcctgcgcctgaagccactggcccacgccatcgccttgttgatggtggcaggcaatgcccaggcggccacggcgttcagttccagctggtttgccgacaaaggcgcgacccaggcggcgacggcggcacggatcagcgcaggtcaggtaccggggattccgtcgctgaacgaacaggcccgggtcaaccagcagttggcgcgttccatcagcacactgaacaccagtgtcgcggccattgctgcgcaacaggcggcgcaggcagctgggcgccaagcggcgttgggccaggtctcgaccattcccgatggcttgggcaagggcggcctgcaggtcgataacagcctgacccagggctggatcaacgccaagaacccgacccagagccagtccggcggcaagaccaccgtgaccatcgagcaaaccgccgacaaggcgatcctcaactgggagaccttcaacgtcgggcgcaacaccaccgtggatttccagcaacagtccaattgggccgtgctcaaccgtgtcaatgatcccgattcgcgccccagcgagatccaggggcagatccagggcgccggcaccgtgatgatcgtgaaccgcaacggtgtggtgttcagcggtaccagccaggtcaatgtgcgcaacctggtggccgcggcggcgaacatcaccgatgaacagttcacccagcgcggtatctatgtggatgccaatggcacccaggcgaccttcaccgatgcggcaggcaaggtccaggtgcagcgcggtgcgttgatccagacccataaggctgcgacctccactgacgccggtggttatgcgttgctgctcggttcggaggtggaaaacgccggtaccatcatcaccgccaaaggccagaccacgctggcagccggtgacagcttttacatccgcaagggcgtcgggactgccggcaatgatcggtccaccacccgtggcaatgaagtcgccaccagcctcaaggccggcagcacggccggcaaggtcaccaacgaggggctgatcatggcctctacgggtgacatcacccttacgggtcatcaggtgcaacagaacggcgtagccctggccagtacctcggtggacacgcgcggcacgatccatctgctgaactcggcaaccgatcaaaccggcagcgtgaccctgggcgagggcagcaccaccgcgatcttgctggacgccagcggcagcacagccctcaacagccagaagggggccggcctggaaaaattcgatggcctggccgccaacctgatcacgggccagttcaacaacctcagcgcggtggccgaccgtaccgaccagtcgcgtatcgaaatcgtcagcggcggcaccgtggacttccagaaaggctcgatcaccctggccaccggcggccaagtcgcggttagcgccaccggtcgcagcctggtgcgcgatggcgcgatgatcgacgtgtccggtgccattggcgtcaaggtgtcgatggacgccaataacatcaagatcaacgtgcagggcaacgagcagcgcgatgcaccggtcaaccgcgatggcgggcaactgatcaacaatgatgtctgggtcgacttgcgtgaactggtcttcgtaccggcaggcaccaatggttatgcgacagaccgctggtacaccgcgggtggcttgcttgaagtcggcggttacctcggcacacagggtcattcggtgggcgaatggatggcccagggcggcaccgtgacctttaccggcaaggaggcggtgacccaacagggtgcgcagatcaacctgtccggcggcaccgtggatgtgcaggccgggtatgtgcgtcagacctggctcaaggggccagatgggcggttgtacgaactgtcgacggcaccaggcgacattctctattcggggctctacaaaggttatgaagacaccagcacgcgctggggccagaccgactactactacaacccgatgatcgccacgcaacgccgttacgagaacggttacaccgtgggccgcgatgccggcaagctggtcatcggtacgagcagcgcggtgctcgaaggccaggtgatcagcgatgtgttccagggcgatcgccagacccaggcgccgaatatcaacctggacggttaccagcagtcccagaaggccaaagcccagcgtgcacagttgatcattggccaatacatcccgatctacaacaaggccaccggcaccctgcgctacgccctcagtggtaccaccgaccaggtgctgatcgacagcaacacgcagaaaatcgcagacggccttgacctcactgccgcattgccggcggaccgccaaggcaagttggtactcgacagtgaccagctcaatggcttccagctgggggcgatcaaggtcggcgccaagcagcagatcaccgtcaacggcgcgctgaaagtggccgatggcggcgacatcaccctgttcgggccgggtgttgccatcaacgccaacctcacggcccatggcggcagtatcaacgctggcaacattctcacccaggttgaccgcgacaaaggcaacgcggtgggggacgtgatcctggcgggcagcgggcggcttgacgtggcctccggggtcaagctggaggccggcggacgctggaataacctcgcgctggaccccgccaaccgtgaaggtgtggcgtatatcaatggcggcaaagtgtcgctgcgcagcaccaacgtggtcaacctcgctgccggtagcctggtggatgtgtcctcgggcgccacggttggcgaagacggcaagctcagtggtggcaagggcggcgacgtgaagctcggcggcctcggcagcctcggcctgggcggcgaggtgcgtggctatggcgtcaacggcggtggcaccctggcgttgcaggcgcacaaggtgttgatcggcacaggtgcggtagatgccgacaccctgcagttgggcggcgactttttcaacaaggggttctcggcgtatgacatcaccggtaatgaagggctgatcgtcgcgaacggtacccaggtcgatgtgaacatgccggtctaccatgtgggcgagcaggccaccggcgcgccgaccggcagcgatgcggcaagtgcgctcgaacgctggaccccgccgctgtaccaggaggacgccaccaagggcgtgctgacccagcgccgtggcgcgagcttgagcctgagcgccggccatacgctgtcgacggccgcgcagatggcgacgacggcactgaccgtgggccagggggcggtgatcaacgtcgatcccggccaggcgatcaacctgcagagcatcggccagctcaccctggacggcacgctcaacgcgtggggcggcagcgtcagcctcaagggcttgaccacggcggactcggaaaaagtcgaggcgatcggccatgggcgttcgatctggatcggcgaacacgcgctgatcgatgtggctggccgtgccgtgacggctgtggacaatcgcggcggcatttatggccaggtgcgcaacggcgggacgatcacggtagggggcgacattgaccccaccaccggggttgccaagaccagcaacctgttcgtggtcgtgcgtgagggcgcgcgcctggatgcttccggcacccaggcgttgctggatgtgccaggccaggggcgcacgacggtggcaagcaacggtggcaccctcgcttttgcgtccagcaacggcctgtacctggatggcagcttcaaggctaatgcaggtggtgccggtgcggccggcgggcgtctggcattggcgctggaggcaccgtattacctgcgcagcctggccaccaaccgagtgttaccggtgcgcgagctggttctgagccagcagtaccaggcgcaagcgctgccaggcagtgccgaagcggcggccgatgcgttgacctacggtcatgcccggcttggcgtcgaccaggtgacggcgggcggctttgatagcctggccctgttggtcaatggcgcgctgaacatggcgggtgacgtttcgctggccatgggccagagcctggaggtgtactcacaaggcatagggttggcgaagaacgcgcccgtgaccgcccaggttcatcttgcggcgccccatgtggtactcagcggcatgctcgcgccagatcggaccggcatggagagttacatcacgccgtacctgggtgacccggtatcgactgttccggggcagggccggttcacggttgacagcgatctgctggatattcgcgacaaagtcacgtttgccctcaaccagggctttgaccgggtcaatctcaacagccgtggcgatctgcgttttctcgccggacgcgatggcggcgtcacccccaatggcttcagtacggtcttgcagtctggcggtgacctgaccttgcgggcctcacgtatctaccccggcagcgaaatcgccgcgcaagtgctggtgggcctcaccggcagcacggccaccggtttattgttcgatcccgcgcgtaccctcaccctggaaaaaaacggcgacgccagcgtggtcgctccgtattcgattttcggtcgcctgcaattgggcgcagcgaccatcaagcagggcggcgtgttgcaggccccgttgggtctgatcgaaatcggcaaccagggcagcacccgtgtcgaactgctgcccggcagcctgacgtccgtgagcggcaaggggttggtgctgccgtacggcggaaccgtggacggccaggtctaccgttacaacggtaagaccgtgaacttcatcggccagggcggcgtgcgcaatggcaacggcgacctgacggtcggcgtgatcctgggcggcaagtcggtggcggtactgcccgacgctaccctggatttgtccggcggcggtgagctgctgggggccgggtttatttccggccgggggggctctacggatgcgcgctataacccactggtgcagttcggcgccaacggcgggtttgtgctgccgggattgagcaccaacccggtgtacgccatcgtgccgggcgcgcagccagggtatgcgcccgtggccgccgagggcggtgcggtagcacctttggtcggccagcagatcaccatcggcgcgggtgtgccgggactgccggccggcacctataccttgatgccgtccacctatgccctgatgcccggcgccttccgggtcgagatcaatggcctggcggggaccggcagcggtgccggtgtcattgcgatgcgcaacggctcatggtccaccgccgggcagctgtcgatcatcaacaccgggatccgtaacagccaggtcagccaagtgatcatcacgtcggccgataccttgcgccgttattcccagtacaacgaaatgagttatgcccaattcgccgtcggggatgcggccaagctcggtgtgccacgggcgctgatgccggtggacgccaaaacgctcaagctggccctggatgccggcggcggcagtgacaccttttcgttcaagggcattggccggttcgaagcagccccgggtggctatggcggcacggttgcggtcaccagcagggtgcccaacggcgcaatacagattgtcgacgccaacagcccgttgaccgaagcgttcagcggtgtgacggtggatgcgcaaagtctcaacgccatgggtgccaagcgtttgctggtgggcggtttgtcgatggtgctgtatgggcagagtggcaacaacgtcggatttgccaccagcatggccgggaccatcaccctgcgttcaggcgcgaatctggtggcgccggaagtgatgatggtttcgcgcaatggcgatatcgtggttgagcaaggcgcctccatcaataccctcggccagggcgcggcgtcttatgattcacgcgatggctttgtctacagcagcgcgcccaacatgctcgtggtctccaacggcttgatcaatgtgctgccgtatccggaaacggccggcaggggcggcggcatccggatcggtgcttgcgtcacgagcccttgcagtgggcagactgcgttgtattccgaaggcagtatcgtgatctcgaccacccaggccctggagctgaatgaccaggtgcgctacggcactcgccacctcgcactggccttgagcaacatcaacgtcggcagcgtcgaggccctggccgatgccgccgcacgcaacgtgttgccggcgggcttgaccctcaaccagcaggtgatcaaccgcttgctgcgcggtgatacccagtctggcgcaccggccctggaaaccctgcaattgtcggcggcccaggcattcaacttctacggcaccacgacgctggacacgtatgatgcacagaccggcaagtcgctgctgaacaacttgttgctgtccacgccggcgatctacggcgccggcaatgccaatgacgtggcgacaatccacaccgccaacctgatctggcagggcgccgaggcgcctcccggcgccgtggttgccggcggtgccggcaccggcagtgggcgcctggatatcaatgccgagcgcatcgagttcggctacggcgcctttgcccagcccagcaccaccaagactttcgaccgcctggccctgggctttgccaacgtcaacctgaatgccagtgaccgcattacggccaactacaagggcagcttgtcggtataccggaacctgaccggctacgacccggtcaagggcttccagtacagcggcggcaacctcaatatcctcacaccactgatgaccggtgaagccggctcggtcaaccgtatcactgccggcggcgccattgatgtcgccgccgccgccggtgcgcgggggaccgccaatggcatgggcgccgagctgtccctgcaaggcgacagtgtgcgagtagccagcgccgtggtattgcccagcggcaaggtcaagctcggcgcacggggcgacgtggtactgacggacggcgcattgatcgacgtcgccggacgctcggtggtcttcaacgacctcactcaatacggctgggggggcgaggtattgctcgacagccgcagcggcaatgttttgcaggcggcgggttcgaccatcgacctgtcggccaaacataaccaggccggcaaactgcgtgcggttgccgttgatgcggcaggcggtattgtcgacctgcaaggccgcgttctcggcagcagcaccggctactaccacgctggcggcaccttgatgccttatacggcgggcagcgtggaaatccaggcacaacgcctgggcggcaatggttcgctggaccaacagtttgccgacctcaaccagcgtctcaatgccggccaggtgttcggtgcgcgcagcttccagctcaaacagggcgacctgaccatcggcgaggggctcaaggcgggcatcatcaacgtctcggtcgacaacggcagcctgcgggtcactggcctggtggacgccagcggcgaacgcgtcggcagtatcagcctggccggcaagaacggcctgaccctcgcgggcagtgcggtgctggatgcccacggcagcaagttgcgggtggacagctacggcaagatcatcgattcgccgaaccgggccatggtggcgctgagttccggtaacggcgtgttgaccctggccgaaggcgcgcgcatcgacctgcgccacggcaccgcagccattcgcggcaacgatgggcgcaatcgcggcaccctggagctcaacgcaccgcgcctggccggggccggcggcgtcatcaacgacatcgccatcgacgcccatggccgcgtggacattcaaggtgctcgcgcgatcaccctcaatggcatggccacctatgacgatgcgcccgagaaaaccgatccaaccgccagcggcaaaccgtaccagcaaatcacccaggattatctgaacgacaaacatagactgagcacggactttatcaacgcggcgctgctcaacaacaacctgctgcaaaacaagctcgccggcttgaataacgacacctacggcgacaccttccacctgcgtcccggtgtggaaatcgtcagcaagacgccagacggcgacctggtggtgcagggtgacctggacctgtccggctatcgctacgccagcctcaagtcgccgacccatgaaaagaccgaggccggcagcctgaccttgcgcgcggggggcgacctgagcatctacggcagtatcaacgatggctttgcgctgccgccggagactgtagacgacaagggctgggtgctgttgccgggggttgacttcaccggtggcgatatcgtggtgccggggcagggtgtgagcctggcaatcggcacggccttcccggcgggtgtggtgctcaactacgacctgccgatcgccgacatcggcgtgagcgcaggcacccgtttgccggtgcgcgccaccctcagacaggacctggtgctgccagccggcaccgtgctggcggcggcggtattcgacagcacgggcaacgtgctgtttgccgctggtaccttgctgagccaggcgcagaccctggtcagcgggtcgcaactggacgccggcagtctgttgacccagaacactttgttgaaggcgatgacctggcccaagggcgtgccgctgccgcagaatttccaggcgcctggccccacccagaacgtggtgaccctggcccgcgatttgttgttgcccaagggtgcactgattccttccggtaccaacgtcaagttgctcaacgatgcgacatcggtcgagctgcgtcccgaagtggcggggcgccagggccagaactgggccattgcaccgatgctggccgagggttcgcagtcgtggtcgctgcggctggtggcgggcgccgacaccgaggcggccgacagtcgtctgttgcaacctcatcccacaaccggtgacctgcgcctggcggacagtcactacggcatgttcgccaaggagctgccgtcccaggtcgtgcaaacgtggtctgcggccggggtcgagctgctggcgagcctgggcaaggacgtcaaggtgggtgacccgatcgaacagtcgctgctcgatgagctgggcggcggtccgatcgccgatttctgtgcgggttcgccggactactgcgcggtgaagccatcgtttgtctggaccgcccaggcggtggcggacctggccgagtacggcctgacggaaggcgcgccgattaccgatgcattcctggcgcaatttaacaccaccaccacgcagttctgtgcggataaccccgcttactgcctttcccaatcggtcaaggagttcggtgcaagccccgccgcgacgcgcttcagtgtgatccgcacaggcaccggcgatctggagttgttgagcgccggcaacctgagcatggactcgctgtacggggtgtacaccgccggcacctcgtctgccgccaccttcgcgggcgacccgtacaaccagcccaagtccaacggccggggcaagaccgtgctgaacgacgagggcagctatttcgagcaattcgtcaacgccagccccaccagcctgtaccgcgcctggtatccgcaagcgggcggcaacctgaacgtgaaggtgggtggcaatctgacaggcaatatcctcaacgtcacggcttccgcgcctggtcggccaaaccctctggataccggctacgattcggccagtgtcggcaactggttgtggcgccagggcagcggcactgtcgatacgggcggggcagcgcagcccacggcctggtggatcaatttcggcagttacaccgcgaccgccacagctgaccaactggtgggctttaccggtttcggcaccttgggcggtggcgacgtggatgtacgggtaggcggtgacgccgggatgcttcgctcgctggccggcaatgccatggcggccaatgccagcccacgcagccagggcttggtgctggcggtcggcagcaccgggcgggtggccagtgatggcagcctgcaactcaccggtggtggtgacctgcgggtgcatatcggcggggcgcttaaccctgaaagccagcttgatagcagcagcttgaacggcacactggtggacctgcgcggtaacgctcaactgctgggcggcgcctcgggccggatagagttgcagtacggcattgccaataccgaccacagcccgggtgaagtgcgggcgttcgacgcgttgcaggccacccgggggctgacgcgcggcggcatggtgctggtgccgggtgatgcgacgttcagcctggcgaccctgggcgacctggcgttgcagagcgtgatcgaccccggccgggtattgctgcccaacagttcgtcatttgtccgggggcaggaacacggcccaggcaccagttggttctcgctgtggaccgggcaaacggcgatcgacctgttttccgccggcggcaacctgtcgcccaattccacggggctggcctctgacctggcggtggtctatccgtcgatcttgcgtgcgacggccgccagcggcagcctgtactacggcaaggcgggtagctcttccttgaccgacaacgattacaaattcccgttgttgcttgctccgggcgtgaacggccagttgcagttgctggcccatgattcgatctatgccggcggcacgttcgtgagccaatcggcagctgatccagcgatcatggccacgccttggcaaccggcatttgtcggcaggctcggtaccgacatcaagcctgtcgccagcaacctctcgccaaacggcagttccgacaacgtcccgcttctaccactgtttgtgtttggttccgccagcgcgtcgaccagcggttatgctccggcctccgctgcgcgtttctacgcattgaccggtgacctggtgggtgtcagcagtgggcggatcatctcgtttggggtcaaccccggcgatctgcatcaagggcagacctggtacgagggcggtggtgccgtgtggatgatggcaggccgggatattgtcagcagtggcagcctgtttgaccgaatcagcggttaccagagagaaacgtccatgggcaacctgtttgtccacaacagccccaccgatatctccatcgtgtctgccgggcgcgacatcctctacagcaacttccaggtcgccgggccgggcgcgttggagctgacggccgggcgtaatatccagatggacgacaaagtcagcgtcaccagccttggccccgtagcctcgggcgataaccgccccggcgcgagcattgtcatgcaagccggcgtcggccccgacggcccggattaccgtcgcttcgtcgaggcctacctggaccctgtgaacctggcgcagccgggtgagtcgatccagagcggcaaggtcgccaagacctacgagaacgaactggtcggctggctcgccgagcgctttggttttgtcggcggcaccgagcaggcgcgcacttactacgcggcgctccccgccgagcaacaacgggtgttcgcccgcgacgtttacttcgccgagctcaaggccgctggccgtgagtacaacagcgctggcagcgtgcgccagggcagctacctgcgtggccgcgtagcgattgcggcgctgttcccggacaaggacgtggccggcaacccgatcacctacaaaggcgacatcacgatgttcggtggcgcgggcgtacacaccaacttcggcggttcgatccagatgctcaccccgggcggcagccagaccttcggtatcgaaggcgcggcgccaccgtcgacggcgggggtgatcacccagggcgcgggggatatccagctgtattccctgggcagcatcctgctgggtcagagccgcatcatgaccaccttcggcggctcgatcatgggctggaccagcgaaggcgacatcaacgccgggcgcggttccaagaccaccgtggtgtacacgccgcccaagcgtgtctatgacaattggggcaacgtcggcctgtcgccgtcggtgccgagtaccggtgcggggatcgccacgctcaacccaatcccggaagtgccggcgggggacatcgacctgatcgcgccgctgggcaccatcgacgccggcgaggcggggatccgtgtgtccggcaacgtcaacattgccgccttgcgcgtggtgaacgcggcgaacatccagacccagggcaagtcgtccggggtgccggtggccgccagcgtcaacaccggcgccatgagctcggccagcgcggccggggcggcggcgtcccaggcggcggaagacgcggcgcgcagccagcaggcggccgcgaagcagggcaggccgtcgatcatgactgtggaagtgttgagcctgggcaacgaaccgttgccgcaagagcctgcgccggcgcagaaaacctccggctacaaccccaacagcccggtgcaggtgctgggcgcagggccgctgagcgaacaggcgcgagcgcggctgacggatgaggagcgcaagcagatcagtttgtaaggctgtggaaaggacctctcgatgtaccgttcggggcgatcaatgatcgcccctttttttgcgccggttacgggttgtccttgagggtcttgaacgactcgatgcgtttgatcagccgcgtgttcttcgccgagtcggcattgctgaacaggaaggagaagtccgacgccagcccggattttccggcaatcgccgcgtactggtggcagtcgttgcagttgtcggtctgcacgtaggtttccatggtggtgttggcgacgacgacactctggtcgctgacaaacggcccataggacagcggtacctgcacgttcggccctgggcctgggtcgttgggcgcattgggcgtcttggaccacagcacattcaccagtttgtagtactggaataccgactggccctgggtctgctgggcgaaggtctgctgcactgccgtgttcagcgcctgcatgtcctggggcgtggcgttggcgcgggtggcctgcaccggctggtcgaggggcgtgcagttgggcggcgtgtgcgtggcgtcgcactgcacgcggggcacattcggcgtgcaggcatcaccggtgcatgccgggttgttgaagctgtagccctcgggcggcgcggcaccaccgtcaggcacgttgtcgacctgctcgaaggtggtccagatgaaattcggctgggtctgggtcttgttgatgatatgcaggcccaccaggccaatcacttcctgggtgcattgcagcgtgtccgggcgttgcagccaggccacggtggtcaggtagcgcccgtacagggcgggcttgttggtgagcacgcgccaggcggctttcagttccagggcgccgagttcttcctgcggcagcgccttggccggcagttcacgcaccagcttgccggccggcagtgacaggccggcggggtgccgtttgtcgctgttctgcgccacgatcagctggttggccgcatcgtacaaaccgttgtcgacgatgtagtcgaactcggccttgcccaccttgcgctcgaaaaacaccaggttgccggactggtccgttagccaaccgccggaggcttccatgatcgaatcgggcagggtcacctgggtgccgctggacaggtggaagcggtgcttgcggttgatcgcgctttccgaggtggcggtgatgaatttacgcgcgcccgtggcaaacgccttgaggttgccggtggcggtgcagttggacggcaccagggtttccacgccccagccggacggcttggccgcgccgggcaggaagatctcgctggcatccttgtagcttgcccacactggtgccttgctcatcggttggccgggcgttgatggcacgccgaactgggctgcgctgctttgcgtatccggctcaccggccaggctcgggttggccggccagccggggttgaccggccagttcatggcgatgaacaactgccagccgaagcagttgagaaaggcctgctcggtgccgaaattgttcaccggcaggaagccgccgctggtggggtcgaacaccaactggctgacgcagctctgggcatccgaggcggcactggccggtacgggggccagccacgggagaagggcgcaggtgattgtgcagacaatacgcaagcgtgcccggcgcagcgggcgaagccatccgttcatggtcgcattccttgctcaagactttaggggcggccacccacgccaggcatgggcggccgggtggaactcaggcgctgggcaccagggccaggccgctttcccatgggtgctcggtggcactcgggttggccgcttcgttggggttgagcgcacgcacgctgaccagccccggcgccgcgttgctgctgacggtaatggtcatgatgtagccctgggtgccgccgccgtcggtctgcccgggaatcgccgaggcatccggcaggaactgcgtgacctgggccgtgacgcccgggttggagaactgcacccgtgcatccgccgccgtggtgttcgggtcggcgccttgtaccaccaatacgaactggcctgagctgccgggcgcaaagctggccggcaagtcgctgggggattgcccgtagaacaggtcaatcggcagcaactgcacgggccagggttgcgcatcggtggtgttggccgccacgcaggcacactccttgggctgggccgtgagcggcgcaggggtcacgctgagggccacattcagttcgttggcgatcacccacacgtagtcgatcggcgtgccgttgatggtgatgtcattgatcgagaaccccgcgctggtcggcacctcgaagaccgcctggagaatctggtcggagttgttcgggccggtgccggcggtgccacgggtaacgcgccagtagctgctgacatcctggccttgcgggcctttccaggtgctgaaggacttgggttgctgcaggtacaggccgatggggttggtcaacgagatcaggttgttgaccgccgcctggttggcggagaacccgatatgcgggtcggagttgcggtagttctgcccgtactgcgcgcagcagatcaggctctgctggttctggctgctgctgagcggccgcaggatggtggcggccgccgccaggtagatctcggcactcagggtgttggggccggaggtcaggtgcatcgcgccacccgacacgcccggtatgcgcacggtgccgctgttccatttgttcacggtgtcgtaggcgggctggccggtggtggggtcgagcaccggttcgccggccttgccggtcgggccgtcggcggtgtagcgcaggtacaggtcttcgagtttcacctgcgggtcgacatacgcctggtacagacccagcacggcacccgggtcgatgttccacatggtcaggaagtacgccgggttctcgctggtgaacatgatgctgcgcatgctgccgtcggggtcgcgggtgatcgaccactcgcagtattcatccagccagccccgtgggccagagggcgaaaagtcggcgtaggggccgttccagttgatggatttgcacagcacgctggggatctgcagttgggtcgcctgcgggtccgggtacagcgaatacagggtgttattgagggtgatctggccgtggtcggtcagttgcatcacctggtccagggtcatggccttgccgcccagttgcgggaccacggcggcgccgttgttgtagaagaacgtccagaggcgattgggaaagggctgccaggtgatggtcttcggcgtcagcgtgccgtagccgctctccagcgggttgtaatagcccgagcgcggtgcatcgttgaggttggaccaggggttgccgatgatcgacatctgggtccagccggtgacgttgttgttccagtcggtctcgaaggtcggcaactggtcctccaggccgagcttgttgtagtccttgggcgcttgttcggcaggggaggtgaattgggtgaagggtgtgctcatgtcggttctccagcatgggtgttggtggagcagcaaccggcgtccggagcggggccggcagaggtttggcgtgggtcgtcccacaccagttcggcgataaagccaggcagcggcgcgtatgcatcggccgtcaacacctggccactatcggagtgggtcacgaccagcgataactgcgctgcgtcggtcggtttgagcttcagtacctgggcattgcgcgcagcattcagcgcccgcgacacgccctgggtgatgcagcggcccttgtcgtctaccaaccccatgccgatgcggctgaaacgcccgacgtaatgcgggttgtcggcgcgggcgtgctgcgccgtggcgtcgggttggttgaggaagacgtcgatcaggtaggtgtcatgggtgcagcgcacatggtcgaacaccacccagggacctgtgcctgcggcctgcggttgatggcagcacgcagcctgggccgcgccgaactgtggggcgacgggcgtgccgtagtcgtagccgatgtgccggctgtcctgggccatgtcgccgagggtggtgtagcgccaggcatcggcgctggtgaaggtcacgtcattggcctgctgcccggcgaacggctgcaacaggcattgggtggtgtactgcgccgccgggttgacacggatccagacctccagcatgcgatcgatattggcgtgataggaacagaacaccgggtcgaacgcggtgtaggcgttgtcggccatgtcgccgccgatccagccgtgatagttgtcgtggggctgctcgtagagcccgtcgaaattcaatgcgcggttggggtacagattgttcggttgcggtgggtcgaaactggtgatgttggcccacggatagcctggtacaccctggggctggctgaaggtggtgaacgccagcgcatcgaccacctgctgctggaagatccggctcatgccatacaactgggtgcgctcgaatcggaaggcctcgccctgggtgtagaacagcgggttgcgctgcacataccggcagtcgacgccctcgaccggcgcggtggcgcagaccttggagcaaccatccttggccgccgcataccgcaacgggttatgccgcacctcaccggtgtgcgggtgcacgtaggtttcatcgaggaacgcctgaggcaagccggcctgggggctgccgtcgatactggcgtctgcggccatccagtcccagtagggaatcgcgcagtcgatcaacgcttccaggtacagcaggtaagcgcggtgccacagggcgaacgcttcctggtagtgcaggcaccagttggtatggatgtaggcatagcgctgccagggtgagccgctgtcggcgtcgccaatgtgcatcacgtcatccagcttggcgcggtacaggttcagtgcttcggggctcagggcgcggatgtcctggcgcacacgcttgaccgggtgtggcagcgccggtggcgggatgcgctcggccgggtcgaacggcgaaatgctgtccagccgccagccctggttgacccacaggcggaaggtttccagggcatcgagcggccagaactgctgctgatcggtggtcagcggcatgttgcgcgaggccaggtgctggtagatggtttgcgaccaggtcttgaccgaggccgggtcttccaggaacacatcgtaggcgttcatgcagccgacccaggtggcggcgacggcggcgcgctggggggcgggtatccagtagggggcgctgaacagcgccttgatatcaccggtccatgtcggtttcgcgactatcataagatccctctcatgccgccttcaggccaggtgttggccgggctgctaagctggatcgatgttaactagccactgcgcaggatttgtgcaaattggcccgtctttgcgacgtattcattgcattttttcaaggacgatttggaaccgatgacagacgccatggatttgaagatcctgggcaagttgcagaaggattgcgaccagagcctggagttgttgagcgacagcgtggggctgtcttccaccagttgttatcggcggattcgccgcatggagagcgtagggatcatcaaggccaaggtggcggtgctggatgaacgcaaattggggatccaggtgacggcgtttttcctgatcaagctggacagggacagccaggatattgaccgcaagatgcagcacatcctgtcgactcatccggagattcaggattgttacttgatgaccggggagtttgattttgtgatggtggcgaagtttcgggatgctgtggagtacaccgagtatatctatcggtttctggagacttatcgggatattccgattcggacttattcttctacgttggtggttaggacggttaagaagtcttatgagttgccgttgcagggggttgggttttgttctcggagttgagtacatatccgtttcttcggtaacggctacttatggttccgctcttacagcggctcacttttggaaaggccggaatgccggcccagccaaaagtaagcaaaaggccttcgccccaacactcggtgcctcgcttaggctcggcatgccctcactccggcttgaatccgtgggccgccgcaatgggccatccatggcccagtgcggctaacccggcgtcctgccgggttacccacggattcaag

SEQ ID NO: 36 - DNA, 97879 bp, Pseudomonas nodulensis
  misc_feature (10656)..(11109): n is a, c, g, or t
ggtcagtcactgatgagttggctgacacaccgccatcgggggcaagccccctcccacagtttgatcttcatgtatcagttgaagggtggtttgctctggctctggctctggctctggctctggctctggcttttgatctgcttttgattttgatcttaggcgcccccccaaatcactgtcggattacgggcacaccgagcctgggcgaggtgccgagtgttggggcaagagcgttttgcttacttttgcgcttttcaaaagtgagccgccgtaagggcggaaccataagccgccgttacctaaataacggatatgcccccgaaaaaaatgccccccacccaatcaaaaatgaagctttcatgacaaaagttcggtagcccatggccactcccgtctcctctgtgtaacgcgcttgagcccaccagaaaggtgagcttttcagccgcaagcaggatgccaggagtggggcgatgggaactatggaacgttactcgaaagtgggcatgcaggagctcgaccagcgcctgtcgaagatcgtcgaagcggcgcgcaagaagccggtgtcggtctatcgttatggcgcgccctgggtatggatcgtctcccaggaagactggcagggcgcccgcaaggaagtctcaagctacatcccggctggccattccctggtattgctgcgcccgcagatcgacgaagtgctcgaccagcaccgtgactggctcaccgccgaacccgcgatgtcgatccctgcgcagaccgtgctgcagatcctgctgctgcaactgctgtattcggtgcccagcgagcagcaactgcatgaacagctgaactacaacctgctgttccgctggttcgtcggcctggacctcaaccagaaggtctggagcgttcatgtcctgacgcgcgacatcgccacgctgctgaacaacccgcgtgcggtgcaactcatccagaaaatcatcggtgacgtgttttgtggcgccttgctgcacatgccggagttctccttgaacttcgccctgttgcacacctggctggcacgccacggcaacactgcgatcaccagcaattgagcaggccgcacgccggggattcggcgacggtgcgaacaatcagacagtcagggggcggtgtggagcatctgttcaaattaacgctggcgctgtgttgcgtgacgctggggagcctggcgcaaccggtgttggccgaggaagaggcggcggcgcgcaaggtcgacgtcaacgagtacttcgtgcgcggcaataccgtgctcgatgcggcgacgatcgaggaggcggtgtacccattcctggggccgcaaaagaccctgggcgatatcgaaggcgctcgcgatgcgttgcagaagatctaccaggcgcgtggctaccagtcagtgtttgtcgagctgccggagcagaaggtcgatgacggtatcgtctacctgcaagtgagcgaaaccaaggtcggccgcgtacgtgtggtcggggccaagcactattcaccggtggaaatccgcgagcaggtgccggccctggaggagggcgcagtgccggactttgccacggtgcaaacccagttggccggcctcaaccgcagcgccgggcgccaggtcacgccgctggtgcgcgaaggccagcgcccgggcacgatggatgtggatctgcaagtggaagaccagaatccctggcacgccagcctcggcctgaacaacgactacagcgccgacaccgagaagctgcgttcggtcgccacgctgggttacgacaacctctggcaactgggccacagcatttccctgacctatttcaccgcgccccaggacaccgacaacgccaaggtctggtccggttcctacagcgcgccattgaacgagcgctggaccttgcagttctccggttaccagtccgacagcaacatcgccaccatcggcggcagcaacgtgttgggcaagggccattcctacggcgtgtcggccatctacaacctgccggcggcgggaaattgggccaattcgttctcgttcggcgtcgacttcaaggacttcgacgagcagatgaaattcggctccagcagcgaccaggtgcccctcaagtacgcaccgttcaccctgggttacaacggctttcgctataccgaacaatcgcagctgggcctgggcctgaacctggtggtgggcacccgcgcgttctttggctacggcagcgatgccgaagagttcgactacaagcgctacaaggccagcgccagtttcgccgtgctcaagggcgacctgaattacacctacacctttgccaacgattggcagtcggcaaccaaaggcggcttccagctcgcgtcggggccgctggtctccaacgagcagtattccgccggcggcgccacctcggtgcgcggttacctggcggcggagcgtaccggggatgagggctacttgctttcccaggagctgcgcacgccgtccctggccaagttcctcggcagttatgtgcaggagtggcgcttctatgcgttcgccgaaggcgcgcgcatgcgcctgcacgacccgctgcccgagcaagaagacgaatacagcctggccagtgtcggcctgggcacccgcgccagtttgagcaaatggttgtccggcagcctggattggggctacccgctgctcgatggaccgaacacccagaaacaggactcgcgactgcacttcagtgtgcaggcgactttctgactttttcttccggagacttcacccatgcaacgcctattcctgagcctgttgatctgcctgggcttcgcgctcccggccaccgcccatgcctggtggcaggacgactggcactaccgcaaacagatttcggtagacaccaccgcccaaggcgccgcgatcagccaggccctgggccgcactgcactgctggtgcgcctgcacaccggcaacttcacttttgacggggtcaaggacgacggttctgacctgcgttttgtgagtgccgacgacaagaccgtgttcaaccaccagatcgaaagcttcgacccactgatgggcatggcgctgatctgggtcgatgtgcccaaggtcgaaggcggccagcgccaggacctgtggatgtactacggcaaccagaaggcaccggccacggccaatgggcaactgaccttcgacccgaactacaccgcgctgtatcactttgacggggccaatggcacaccagcccgggacaccacggcctacgccaacaccgcattgaacgccaccggcgcgagcatcgacggcgtgatcggccgcgccttgcagttgagcggccaagcgttgatgttgccggccagcccctcgttacagcacgcggcgggcggcgcgttcacgttcagcgcctggttgcgcctggaccaggccagcggcgagcaagcggtgctagcccgtcgcgacggcggccatagtctgttgctgggcctgaaccagggcgtgccgttcgtggaagtcgacggccagcgcgccgtgtccacccaaccgctgaaccccggtcaatggcaacacctggcgttcaccgccgagggcgacaagctcacgctgtatgtgaatggccgcgaaaccgcgaccctggcgcaggccttgccggcgttcaattctcagatcgccatcggcgccgacctgccggaagccggcagcacccacttgccattcgccggggccatcgatgagctgcgcctgtccaaggtggcacgcccggcagcactgttgctggccgatgccagcgcccagggcgccgagtcgaagctggtggcctacggcgtggatgaagaacagtccggctttggcttcggtagcctgggctttttgctcaacgccgtaccggtagatgcctgggtgatcatcctggtgctggtggcgatgatgttccagtcgtgggtcatcatgctgcgcaagaaccgccaggtcagccgcgtgagcagtgccaacgagatcttccgcgagcacttcgcgcagatcggcacccgcctggagatgtacgccgacgacgcacagttgggtgagcgcctggcccattcgtcgctgtggcgcctgtatctggtggcggtcaaggagatccgtacccgccgtgcccagggcgccgacacttcgtcggtgtcagccgccaccatcgaagccatccgttgctccatggacggtgtgcgtacccgcgagaaccaggccctcagctccaaactctcgaccctgtccaacgccatcgccggcggcccgtacatcggcctgctcggtacggtgctggggatcatggtggtgttcctcggcacggcgatggccggtgacgtcaacatcaacgccatcgcccctggcatggcggcggcgctgctggccacggccatgggcctgttcgtggcgatcccggcgctgtttggctacaaccgcctgatcacgcgcaacaaggaagtcagtgcggacatgcgcgtgttcgtcgacgagttcatcacccgcctggcggagatgcacggcgagagccagcacagtgaaaccgcgcaccgccgcgaacatcacgcatcggttccggcctgaggagaatcgccatggcttccgtaaatgcctcccacgacgatgacgatgacgcggccgtcgacagcatcaacatcacgcccctggtggacgtgctcatggtggtgttggtgatgtttatcctaaccgcgaccgcccaggtgtcgggcattcagattcacctgcccaaggccagcgcctcggtgtcgttgtcggaggccaagaccaaggccatttccgtgaatgacggcggccaggtgttcctcgacgcctacccggtgaccctcggcgagctggaagagcgcctgcgcatcgagaaagcgctgaacccggacttcccggtgatcgtgcgcggcgatgcgatggtgcagtaccagaaggtgatcgaagtgctcgacctgctgcgccggctggagctgtcccaggtcgggttggtcaccggcaaaccgagccagggctgagtcatgactgcacagatgccgatcaggccaccgcctgtgaaaaacacgccgccgtggcgcccgttgaagtggggcgccggccttttgctgggcgccgtcgccgcctggttcttgtggcagtgggccaatgacatgagcggcgtgcgccgtgaagcgccgaaggtgccgacgattatcccgttgccgccgccaccaccgccaccgccggaaaagcccaaggagcccgaaccccaggtcgaagaaaaagtcccggaaccggtgccgagccccgaacccgaggaggtcaaaccggccgaggaagcgccgccttcgcctaatgaagacttggccaacccgatgcagatcgatggcgacgcccagtccggcaatgacggtttcaacatcggtgccggcaagggcggcggtatggccggcagcggtggcggcgggttgggcaccggtacttataagcagtacctggccggcacctaccagcgcttgatgcgcgaagacccggagctgcgcaagaaggccttctcgatacagatagacctgtggttgggcgccgatggccaggtcaccaaggcgttggtggccaagtccagcggggatgccgagaccgatgctcagatgctcgccttgatccaggcgccgcgtgccacacagaaaccaccggcgtcgctgacgctacccatgcgcctgtccctcaagggccggcgcccggattgattgaatccttttttcaacggttttttacaggagttgcgtacacatgatctcccccgtgaatcgactgaccctggcggtcggcatggtcatcgcgaccctggtcggccaggcggctgcggccccggtcgcaccctcggaaaacgtcaccatcaacctgatccgcctgctggtgcagcagggcgtgctgacccaggacaccgccaacgggctgatcgcccaggccgaaaaagaagcccagcaggcgcgccaggccgccaatgccgcgccggtagtggccgcaggcccgaccgcagcccccggcgatgtgcgggtgcaatacgtgccgcaggcggtgaaggatcagattcgtgaccaggtcaaggccgaggtcatggccactgccaagcaggaaaactgggcccagcccaatacctttccggactggatctcgcgcatcagctttgacggcgacatccgtctgcgcgacgaatcgcgttacttctcgggcaacaacagcaacaacatcacggacttcgcgaaggtcaatgacaccggcccctatgacgtcaacaagaactccaacaccaagttcccacccttgctcaacacccgccaggaccgtgaaaacctgttccgcctgcgcgcccggctgggcatgaaagcggtgctctcgccggactggaccgccggtatccgcatcgccaccggctctgacaataacccggtgtccaccacccagaccctgggcggcggcttcggcaaaaaagatatctggctggaccagggctacctcacctggaccaccaccgactacatgaagttgaccgccgggcgtatcggcaacccgttctattccactgacatgatgtattccaacgacctcaacttcgacggtgtggccgccatcttcaatcactccctcaacagcgaatggggcgtgttcggcacgctcggcgccttcccgatcgaatacacctccgacaccgccagcgctaacggcatcgacaaggaagacagcgagaccaagtggctgtttggcgggcagattggcgcggactggaagatcaatcgcagcaaccgcctcaagctggccgcggcctattaccagttccaggacatcgaaggcgagcgctccagcccttgcgcgccttgggcgggtgcggcgggttgcgacacggacggcacgcgggtggcgttcatgcaaaaaggcaactcggtgttcaacctgcgcaacaacaccaccaacccggccgacccggcgaaaacgccggaccctcaattcgtcggcctggcgtccaagttcaatgtgctggacctcaacctggtctgggacagcgagttgccgagcgacttcaagttgcgctcccaggccaacttcatccacaacctggcctacgacaagggcgagatgctcaagcgcagcgaaggcgagatcgtcaacaacatcaacggcaagggccagtttgaaagtggcggcaatgcgctgatggtctcgttcaccctcggcagcgcgctggagatgcgcaagcgcggcgactggaacgtgctggccggctacaagtacatccagcccgacgccttgcccgacggcttcaacgattcctcgttccacctgggcggcaccaacgccaagggctacttcatcggcgccaactacggcatcgaaaagaacatctacgccagtgcgcgttggttgagcgcgtccgaagtctacggccagccgttcgaagtcgatgtgatgcaactggaactcaacacgcgcttttgatgcgcagggagatgccacatgaacacgcgaatctgcgggttgttactgctgctggtcgccactggcgcgtcggctgaaggcatggaggagcgcctgcgcacgcaactgcgcagcaccacccagcaattgcaggccctgcaaagcgagcaggcccaggccagcgccgcgcgcctggctgcggaaaaccaggccaagcaggcccaggcgcaaatcaagcaactgacggccgagctggacaaggcccgtggcgtggccgagcaaatggccggccagcaacagagcctgcacagccaggcgcaggcccaggtggctgccagcaacgagcagatcggcaagttcaagaaggcctatgacgaactgctggtgctggccaagggcaaagaggccgagcgggcgcgcttgcaggcccaactgagcgaacgtgacacacaagtgcagcaatgttcagtcaagaatcaacagatgtacggcgtagcccagcagttgctcgcggcctacgaaaaaattgacgtggccgaggtgatgagcatccgccagccgttcgccagcagcgcccgggtcaagttcgaggagctggcccaaggctttggcgacgatttgtacaagagccgtttcgatgcgccccaggcaactgccaatcattgatagacagggaagagatctccatgagcgaattgatcaccagcgtcaccacccagagcctcaccgagttgctgcaggaagccggttaccgggtcaaccagactgagcaaaacggcatcgtgcaattgctcagcgccagccagggcatcggctttgcggtgcgtttcggcaacccggcggcagagcagggcgcctatgtggatttcacttacagctgcgcgctgcggatccagggcgaattgcccgaaggtctggcccaggtatggaacgcctcacgccgttttgcacggttgtcggtgcagggtgaattcctgctgatggaaatggacgtggtggtggccggtgtcggcgctacgcacctgcgcagccagttggagttgtgggaccgtctgttgcaggaatttatcgtctacctgcgtgagtacagccaacaggccgcgcagttgcaggcggaagccgaggcgccggtactgtgaaaaagccaaccctgatggtcggagcgggcgcgctggccttgctggtggtggcggtgggcttgagcctgcgaccgggcagcgacccggtggcggcacagcaaccggcgccggtgacccaccctgtaccggtcggaccggcggtggcccgcttgggtaaccagcagatcgacctgacggaactgaaaaccgtgctggccagcctgcctgccgaatcccgcgagcaattgcgtggcaaccgtggcgcgttggaaacctggattcgctcacgtctggcgcaaaaggccgtgctcgaacaggccgacgcccagggctggcgtcagcgcccggacgtggagcagcaaacccgcgccgccgccgagcagattgtatttcgcgattacatgttgtcggtcagccaggtgccggccgattaccccagcgccgccgaattgcagcaggcctacgacagcggcaagtcgcagtgggtgacaccgccgttgtaccgagtgagccagattttcctcgcggtgaatgacccgcaagccgtcgacagtgtacgccgccaggcccaggagctgagccgtcgcgcccaggccgcaccgaatgatttcgccgccctggctacgcagttttcccaggacaccgactccgccgcacgcggcggtgactcgggcatgcagccgttgcagcaactggtgccggaagtgcgcagtgcggtgtcgcgcctcaaggtcggtgccgtgtcggacgtggtgcagagtgcagcggggttccatgtgctcaaactcaccggccagcaaccggcgcgcaccgcgaccctcgacgaactgcgtgaacgcctcacccaggccctgcgtgcccagcgccaggaacagatcgccaaggcttacctcgaaggcatgctcaataccgccaccctgagtatcgacggcgccgagctgaacaaagtgctggagtaacacgcgtcaacccgcattggatgcacagaccaacaagacagggagtctcccatggcatttctagaaccgtctgccccccaggggccctccgtttatcgcgtgtcaaccgagggccgcagcagttggctgaccctggcccatgagatcgacccggaagtggcgcgctacttcctggtgagtgcgcgctgcggttgtttcatgcaggcggcgcgcagtttgaatatcaaggcgacgctgttgcgcaagcgtctggcgcagttggaggaacacctgcggcattcgctgttcagctaccagggcaacggtttggtgctcagtcgcgatggccagcagttgcaagcgcagctgattgcactggcccatgaacgacgcttgccggtgacggagcagccgttgattcggctcgcggtggctgagccgatcctgcatgacatccttgggcgtgacttgatcgccttgctgcgccgcaatgccagcgtgcgcctggagatcatctccatcgacagccagttgtcgttgcaggcggtggatgtggacgtggtgctgtggctgtcggacgccgacgggccggtgcccggtccgagctttgccactgaaccgcctagggccctggcgcgtttgcagtatctgccgcatatcgccaagcgttattcgcggttgaccacacggccggacagtgtggaggacctcgacgattacatgctggtgcaatggcagccggatgcgcaggtgggggctttgcaggcgtggaaccaggtggtgcagcagcgcctggcggcagtggtgcaggtgcatgcgtattcgctgatgctggagatgatccgttgtggcgcgtgcattgggttgctgccgcattacatgagcagtttcgaccgggggctggtggcgttgccggggttgctggatgagcgtatgcagcgccaggtgtggttggcggtgaatgcgcaggtgcggaatgaggaggcggtgcggatgattgtggaactgatcgtcggaacgtttgagggacggcgggagtggtttgattgatagatttatcctcggccagcaaatccccctgtggcgagcgggcttgccccgcgttgggctgcgtagcagccccagtgaaggcaccgaggtattcctgaaagaactcagcgtcgggttttggggctgctgcgcagcccannnnnnnnnnnnnnnnnnnnnnnnnnnnnnnnnnnnnnnnnnnnnnnnnnnnnnnnnnnnnnnnnnnnnnnnnnnnnnnnnnnnnnnnnnnnnnnnnnnnnnnnnnnnnnnnnnnnnnnnnnnnnnnnnnnnnnnnnnnnnnnnnnnnnnnnnnnnnnnnnnnnnnnnnnnnnnnnnnnnnnnnnnnnnnnnnnnnnnnnnnnnnnnnnnnnnnnnnnnnnnnnnnnnnnnnnnnnnnnnnnnnnnnnnnnnnnnnnnnnnnnnnnnnnnnnnnnnnnnnnnnnnnnnnnnnnnnnnnnnnnnnnnnnnnnnnnnnnnnnnnnnnnnnnnnnnnnnnnnnnnnnnnnnnnnnnnnnnnnnnnnnnnnnnnnnnnnnnnnnnnnnnnnnnnnnnnnnnnnnnnnnnnnnnnnnnnnnnnnnnnnnnnnnnnnnnnnnnnnnnnnnnnnnnnnnnngggctgcgcagcagccccagtgaaggcaccgaggtattcctgaaagaactcagcgtcgagttttggggctgctgcgcagcccagcgcggggcaagcccgctcgccacaaagaacagttgtcaccgatgcaccgcggcgtgcgtatcgcaggcaagctctcacaagaaaagcagactgacggtcgccggcgttgcgcggctgggataagtgcgccagtcttggtggcctcattccctgggtctaagcacgctgcgatgcaagccacacgcctgacactcatttgccatgccctcacgcccctgcaaaaacaggggcgtttctgcgatgacgagccggtggcgatcgattggcagggcgcggccggctccctcgccgggcgttacaggaaaacgccgcgtttactctgcgctcctgagctgcgtactcggcagacggctggcttgttcggcaatgacgctgtgatcgaagacgccctgcgcgacgccgacttcggccagtggaaaggccagcccatcagccaactcaatagtgatgagttgaatacctggctcaccgacagcaccttcgcgcccccgggtggggagtcagtcgatgacgtgtgtgcacgcgtagcgcagtggctgaaaaccctcgaatcccaacccggccatattgtcgccatcacccacccctttgtgatccgcgccgcgctgttgcaggtgatgcagtttccgctgtcgatgttctaccgcatcgacgtcgaaccgttggccgccaccgaactgcgcttcaacaccgtctggcgcctgcgcctggaaactcacgcctgagcgcctgaacatggcagaatccacgccccgcactgagagcaacccatgaaacgcatcctgatcatcggcattggcgccggcaaccctgactacatcacgatgcaggccgtgaaggcgctcaaccgtaccgacgtgtttttcctgatggacaagggccagagcaaagacaagttgatcgacctgcgccgcgagatctgcgagacctacatcactgagccgggctatcgcttcgtggaggccgagtgccccgagcgtgtgcgcggcgatatcgactacaccaccgccgtgcgggacctgaaccgcgacaagcagcagaccttcgagcgcatgatcaacgaagaaatggctgacggtgaagtaggtgctttcctggcgtggggcgacccggcgttgtacgacagcaccatccgcattttgcaagcgattctggccagtggccgctgcaccttcgagttcgaggtaatccccggtatcaccagcgtgcaggccctggctgcacagcacaaagtggcgctgaaccgcatcggcaagtcggtcgagatcaccaccgggcgccgtctggcggcggggcaggcgagcgatgccgacaccctggtggtgatgctcgacgcggaagactcctaccgcaccgtggccgatcagggcctggacatctactggggcgcctacctgggcacgccggatgagatccttatcagaggcaaggtcagtgaagtggcagaagaaatcgaacgggtgcgcaaggcggcgcgtctggagaatggctggatcatggacacttatctgctgcgtaaaccctgaggtcacgtcccatgctcaaactgtttgccctggcactgaccctggtggttggcgtcgctcatgccgacgatacactgcacactgacttgccgttgtcgtacctggaacagacccagggcgatgcgcgcaaccagccgctggtgattttcctgcacggtttcggcagtgacgaagaggatttgttcggcatcaaggacgcgctgccgtcgacctggacttacctgtcggcccgcgcgccgatgccggtggacccgcatggctatcgctggtttgccaggaagcccggtgatggcgattacgatggcgagactgccgacctgcaacgcagcgcccggttgatcgaagagtttgtcggtaaagccaccgccaagtaccacacccagccggatcgggtgttcctggtgggcttcagtcagggcgcgatcatggcctacgaggtcgggttgcgccgcccggatctgctgcgtgggattgcggccttgagtggcagcgtgctgccggtactcaaggctgagctgaagccggatgtgtcactgggcaaactggcgattttcattggccacggcaccttggaccaggcgctgccttatgcctcggccactcgggcgaatgaggtgttgacgggactggggttgaagccggagttccacgggtatccgggcatgccgcataccatcagtgaaacggaagtgcaggacctgaaagcctggctggaaaagagcctgaattaaacgcggtcaaacattgtgggagggggtttgttccctcccacacttggatcgggttgtctggaagactgttatttcccgccggtaatctgcttcaccagcgccgcgtgccccttcgcatcatccgcgcgcgagattgcctggatcaccagcaggtgattgcccgaaccgcctaggaacgtggagttcagcgtcttgccgccgccctgggtggcggtgctgtccacttggcgcaggcccaggcccttgaaggtcagcttcttctcgctctgtttcttgaagtccggcagggcggcgctctggtccttgacgaagccggccacggcaccatccaggaatttggtgtcgttatccccaatggtcagcccatcgttgcgcacggtttcggcgacgatgactacacttttcgtggtctggttggcgtacatcgtgccttgggtgtcggcagtgccatcctcggccttgccggccggcagggtgtcggcggcgtaggccttgggcaagttaaaggtgaacttgccgcccaaggtggagatggtttgggtggtcggcttggacgcggcgaacacgctgccggcggtcagcgcgagggccagcaggacggcggtcttggtgaaagtggccatgaagcgctccagggatgaacgagattgcggcgtattctgtcagaaaaatcgcaatctcgttcactggcagcctcacaccttgtcggactcttcctccagccgatccatctcaaacagccgcgccagttctgcccgtgcttcctgggcggtttgcatcaccttggccgcgtcgtcgtacaccgcgtgttgcgcggccagcacttgcaggtcgtggttcttgaagcgggtgatgcgcgcgtcggcctgggcctggctcaagccgaggcccaccagggtacggcggctcatttccaggctggaatagaaggtctcgcgcaccggcgaggcgtccaggtcgaccaagcggtgcacgtgctggcggttacgcgcgcgggcgatgatctgcatgtgcgggtagaggttgcgcaccagttcggcggtcttgatgttgatttccgggtcgtccatggcgatcacgaagaattccgcctggtcgaccttggccgcgtgcaggatctcggggcgttgcgggtcgccgtagaacaccggcatgccgccgaagctgcgggtcagctcgatggtttccaccgaggtgtccagggcgatgaacgagatgttctgtgcacgcaggattcgcgccacgatctggcccatacggcccatgccggcgatcaccacgcgtggcgcatcgctttcgatggtgcggtattcctcgggcacttccaccggcttgaccttgggcttgaacagcttcgggcacaccagcagcaatagcggcgtcaccgccatggacagggtgatggtcagcaccagtatgtcgtagaggtgcggttcgaacaggccctggtcgcggccgatcttgaacaccacgaaggcaaactcaccgccggccgccagcaccacgcccaggcgcagggcgctttcgcgattgaggtcacccaccatgcggcccacggcatacagcagcggcaatttcaggcctatcaacagcagcgtcaggccaatcaccaccagcggcgagctgagcaacaggctgaggttggcgcccatgcccacgctgatgaagaacaaccccagcagcaggcccttgaacggctcgatctgggattccagttcgtggcggtactccgagtctgccagcagcaggccggcgaggaaggcgccgagagccatggacacgcccaccaattccatcaaccacgccgtgccaatcactaccagcagcgcagtggcagtggacacttcacgcagcccggtcttggccacgatgcgaaacaccggccgcaacagatagcgtccgccgatgatcaccacggcgatgctgccgaggatctgcaacacatgctgcaggccctgggcttcggtggtcgggtgatcgctgccggccagcagcggcaccatggcgatcagcgggatcgcggcgatgtcctggaacagcaggatggcaaaggccaggcgcccgtggggctggttcagctccttgcgctcggccaggctttgcaggccgaaggcggtggacgacagcgccagacccaggcccagcacgatggcgctgttccacgactggccaaacagccacaacgccaccacgcccatcaccaggccggtcagcagcacctgcgccaggccgacgccgaacaccgccttgcgcatcacccatagacgcttgggtgacagttccaggccgatgatgaacagcagcaacaccacccccagctcggagaactgcgcgacgctttgcgggttgccgatcaggcccagcaccgacgggccgatgattacaccggcaaacagatagcccagcaccgcgcccagttgcaggcgtttggccagcggcacggtcagcacggcggcgagcaggaacaccacggctgcttgtaacaggttgccttcatggggcattgcgaactccaggatctttaaaaccaatcaacaggcgggtattagagcgctttttacatttcgataattgtgtttttgcggcgtaggagggggatagcgcagtgtttttcaagggcgcgagctttctgccggtgcagtggaaggatgtacaaacaatttcccaagcgccgcaggtggaaggccgggcacttcgcctcctaatttttatgctcttgagtttatattccatgggtggcatatttcatgagctgggacgttgaatacacggatgaattcggagactggtgggaggatttgggagcaaaggaacaagtttccgtatccgctagcgttgatctgctggtgcttttaggtccgggcctgggctttccccacagcagcgctatcaagggctcccggcatggcaacctgcgggaactgcgcatacaacacgccggtcggccgtttcgtgtgttgtatgcctttgatccacgccgatgtgcgttgttgctgatcggtggagacaagacaggacaacatcggtggtatgaggaacacgtcccgatggcagaaaagctatatgacgtgcatttggaaacaatgcgtaaagagggccgtaaccatggctaagaaattcgctgagcttcaagcgggcatgacgtcacaagcccgcgccgaagccaagcagttgttccagcaacacatgcaggaaatgccgctgcatgagctgcgcaaagcccagcagttgagccagcagagcctggcgaaggcgttgaatatcaaccaggcggccgtctccaagatggagcgccgcacagacatgtacatcagcacgttgcgtgactacatccgtgcgatggggggcgaactggaaatcatcgcaaccttccccgatggccaggtcaagatcgataatttcacttattgaaagcattgcaaacgcccggcgcgtgccgggctttgttttatccggctatttatcgctttgcatgaccgcaccttgcccgaccggtgcgaggttcaccggccggcgatacaagcccaccgccagcccggcgatgatgatcccgatcgagatcaggttcggcgtggaaatacgctcatccaggatcagcatcgaactggtaatgccgaacaccggaatcagcaacgacagcggcgccacggtggacaccgggtacaacttgagcagcgagttccagccccagtaggcgaagtgcgtggccaggtacacctggaacagtatcgacaggatcgccgtcaggtcgagactgctttgcaaaccttcgaacgcggcgctgccgtgcagcagccaggcggtgaggaacagcgggatcggcgggatcaggctggcccagaccatgaacgagaagatctccttgacccctgatttcttgatgatcacgttgcctacgctccaggccaccgcactgaggacgatcagcatgacgcccagcaccgcgtggttgccttcctgggtggagatgatcccggccaggccgatcaaagccagcacggcgccgatcatctgcgcgccacggattttctctttgaacagcacaaagccccagcccatggtgaagaacacgctgagttgaatgatcagcgaagcaatacccgggctcacgcccacctggatgccgtagttgatcacgccccacatgcccagcccgaagataaaaccgtaggcggccacgtagctgaacttgacggccgggcgcttgataaagaacaccagtggcaaggcggccagggcgaaacggattcccgtgagcacaaatgggtcgatggcacgcaggcccagcttggtgatggggaagttgaccccccagaccagggtgacgagcacggcgagtgacaaatgttttttcagcatggaccctccttgggtcaggcggcacagcgcagttgcaatgtgccgccgggaagtcagttcaaggcgaaccgtttttgcgtcaggcgcagcccggcatttccggataccccttcgaacgaaccaaacttgggcagaggcgattttaggtggcagatgattggcccgcttgctatgtcaggtcatactttgacaaaatcgggccatgtcgccgaccttcaccttatccccttacgaactcgatagccctgctgcggtggtgacgctgcgcgagtacccgtccggcacggtgttcccacgccacacccaccggcgcgggcagttcgcctacgcatccaccggcgcgttgaagatgttcacggagctgggcaattgggtggtgccgccgcagcgggcgatctgggtaccgggcggggtggcgcacgagatgcacatgcgcggcgatgtggtgatgctcaatacctacctggacgatgacgcggcccgacgtgcagggttgcaggaccattgccaggtgtttgctgtatcgccgttattgcgccacctgttggaagcggcgctggcgattgggccatcggcttcgcccagcgtccgtgattgctgcgtgctgaccctgttgatcgacgaaatcggtgccatgcccgagttgccactcagtgcgccgttgccgtccgaggcgcgcctggcccgttcgtgtcaacgcttcctggaggcgcccacgcagaacatttccatcggtgagatggccgactggtcgggcatgagtcggcgtacctttacccgtcacttccgcgagtgcacgggcatgacctttgtttcgtggcgccagcaggtatgcctgctggaggccacggcacggctcagtcatggctcgtccatcaccgatgtggcattcgaattggggttcagcagttccagcgcgtttacgtcggtgttccggcgtaacctgggcgactcaccggcgcgctacctggccaagtccaaggcagcttccctgttctgaacggaggaggcggcgaccctggtgcctttttcccagcggtacggcgttgagcctcgccctttgttactatcgccgtcccttgtcgccaggagtcacggccccatgcagcaccagtgggatgaaatgcaccgcacccgcaagcccacgttcgtactgtgcggcgagcctcagggcgacgtgctcaatctctatgttcacggttattcggcgttcttcaaccggcaacaactgggcaacttcaaggcgcagttggcgagtatcgaaggttcgaccaacctgatgctgttctggccggcggggcatttcctggaaaacctgtttgcgcctttcaaggaggtgatcggcgcgatgctgggcggcggtagcctgggcgcggcaaccgtcggggtgggcaaggcgcttgcctattttcttgatcactacaaaagcgtcgaggcgcgggtggacgaagtcgccaaaagcctgctgccggaactggccaattacctgcacggtgaatcccttgatgtgcggcgtatcaacctgatcgggcattccctgggcgcgcggatcctggtcaagagcctgctcgccagccccgaaaccgcgcgggagctacccttggacaacctgctgttgatgggcggcgcgatctgtacgtcgagcccttgggatgtcgtgtcggcgccgctcaaggggcgggtaatcaactgtcactccagcaaggactgggccttggccataaagccggacaccgaacgctgcatcggtcgttatgcgatcccggtgacgccggccctcaaggccaaggtcaccaacgtgcacctggcgactttcgatcacgccgcctattggccgcaattgcagacggtggtgcagtacaccgacctgctgcatgaacggcgtggcatgatccgctccgaccagcgcagtgctgaagtgcgttttgccgaggaggacatcgatttgttccctgcgctgatgcaggcccggccggaagaggtgaagttcctcgccgaattgatggcgcaaaaacgcagtgcatcgatagacgccacggtgcgcgagccgctcaagttggctattgagctgcaacgcatgggcggcgataccttcatgaacctggcccgtggacatggcgtgggttatcgccagatcgccgaagatgtggtgcagcggctggggatcaagttcgacgagccgctggatacggtcgcactggccgatctcgaagcccgggtcgccgagaaactcatcgaacagtacaaggacaaactcagcaacacggaccgacaggtgttcgacgcagaactcaaagcggccgctcaaaaggagcagggcttgttcagccgttttgacgtaggccggtcggccaccaccgcgttgagcggcacggcgttggccgggctcaccggttttatcctgcgccgtggcgcggctacggcaatcccggtggtgggccaggcgttggcggcggcgatgctggtggtgagcggcgtgcgtgcattttccggcccggcgtattcgatcaccacgttggccgtgctggtgatcggcgtgattcgccagcgcatggagcgtgaagcgctgaaccaggagatggacctggtggtgcaggtggtggaggcgttcgacctgccacgggacacggtgatgcgcacggtcgtgtctgactgataagctgcacccttgtcttgtgtgtgcctgggataccgcgtgaaattcagcctgccgaaaattgctaccgccccgttctgcccgccggaagtggccggctccgtcgccgtggaccccaaggcttcgttcttcaagcgcatgttgatgttcgccggccctggcctgctggtctccatcggctatatggacccgggcaattgggctacggccatcgaggccggttcgcgctatggctacagcctgttgtttgtggtgttgctggccagccttgccgggatggcggtgcagtgcctgtgctcgcggctgggcatcgccaccggcaaagacctggcgcagctgtgccgagagcgttacagcacgcgttctgcacgcacccagtgggtgttggcggaaatctccatcatcgccaccgaccttgccgaagtgctgggctgtgccctggcatttcatttgctgttgggggtatcgctgaccactggcattgtgatcaccgcctttgacacgctgttggtcctggccctgcagaatcgtggtttccggcgcctggaagcgatcatgctggcgctggtggcgaccatcggcgtgtgtttcttcatcgagctggtgctgatcaaaccttattggcccgacgtgttcagtggtttcactccgtcactttccgcgatcagcgacgccgcgccgctttacctggccatcggtatcctcggggccacggtgatgccccataacctctacttgcacagctccatcgtgcaaacccgtctgatcggcaaggacctcgccagcaaactggacgcggtcaagctggcgcgcatcgacaccatcggttcattggccctggcgctgctggtcaacgcggcgatcctgattctcgccgccgctgctttccacaagaccggccatactgaggtggtcgagatccaggacgcctaccatctgcttgacccgctggtgggcggtgccttcgccagcatcctgttcggcattgcgctgttggcctccgggcaaagctccacctttaccggcaccatcgccgggcaggtgatcatggagggctacctcaacctgcgtattccctgctggcaacgccgcctgatcacgcgtgggctggcgctgattccggcgtttctgggggtgtggctgatgggcgacgatgccatcggcaagctgctgatcctcagccaggtggtgctcagcctgcagttgccgtttgcgctgtatccgttgatccgcatgaccggcgataaacagctgatggggccattcgtgaatcggctgccgacgcgcttgttggcgtggtttctgtttgcgctgatcagtggggcgaatgcctggttgattgggcagtgggtgttcgcttgaggcggtacagcgttctagatgagttagaccagaatcgccaaggacgtgtattgggcgatgtgtggatcggccgtcaatagcctcatgggttcgcttatggctgtcgcaataatgagccgatcaaaagggtccttgtgatgctgctcgagatccttgactgcgatggcatgttccgaggtgacgggcagttcggcaaatccgctttccaggcagtactcacggatttcctccaagtctacggtgagtttccccaggccgaccttgattgccatttcccagaatgtcgcagcgctgatgtaaacctccgctgcattctctatcagcttcctggctttgctggatagcctggggtcttccgtcagggtccagagcaggatgtgggtgtctaacagcactctcacggatgcttgccttcgaaggcatccagcagggcgccaggcaggggtgcgtcgaagtcttcgggaatgacgaacttgcctttcatggcaccgattctccggcttttgcatttccccacgggcacaagttgtgccatcgcacgtccatgcttggcaatggtgatgaccttgccagcagcggcctcatccaccagttttgacagattgtttttcgcttcgcccaaaggaaccgtgatcatgtggttatccccatattttggccaaatatagccaaaactgggtgcgctatcaaagacggccagaccgctggcggacgcggcgcgctcagatcgcgatggtttgtgatacgtgactttcatggcagttctctaaaagaggatgttgcgcaagtctgccgtaataggcttggccacaagaatactggcccgaaaaaacagaatggaactacttcctgctgtaggaaaactcccgaaccacttggttcaccgatcccaatacggcacggccccaaaacactccacaaaataatcaatcaccgtccgcaccttcagcgacaggcgccggctgcctggccacagtgccgcaatctgctgcggctccagggttgtcgccacttcatagtcggtcagcaccgcctgcaacgtgcctgcgcgcaagccttcgccgatcaaccaggagggaaacaccaccagccccaggccttgctcggcggcatgggtcaaggtgtcggcatggttgccggtgatcggacccttgacgctgtagggcgtccagtcgccctggcccttgcggaaaaaccagcgttgctggccggtgatgcctttgtaggccaggcattggtggtcgatcagttcgtcgggatgttgcggcgtgccatgccgggccaggtaggcggggctggcggcgatgcgaaagcgttggggcgcgaagatgcgagcctgcatgctggaatcgttgagcacgccgatgcggaacagcaggtcagtgccgtcctgcagtggatcgacgtacgtgtcggtctgctggatgtccagttgcagcttcggataccgtcggcacaactcacccagccacggcgacaggtggcgctggccgaacaccatgggggcattgatgcgcaccaggccgctgggttcgctttcctgttcctgcaatgcctggctggcggcttcgagttgttccagcatcaaccgcgcatgccgccccagcagacgaccggcttcggtggggctgaccgcgcgggtgtgacggtagagcaactgttggccgagggcctgttccatcagctgtatttgtcgggagatggaggagggcgccaggccttcgcggcgggccacttcggagaagctgcccaggtccagcacggccacgaacaggcgcagtgccttgaaactcaattcattcaagccttgcatcatgcctccaggctgtgcgtttttcgcaaaggtgttgtcagcatgctcccatttatcgcacaggacggccaccggataatgcgcgccatgtttcctttcttgaagtgcaggtgttgtatgcaggcaagttctatcgagggtgtggcgcaagccaaaccgaaaaaaaatggcttgaggttgctgttgttgccgctggtgatcctggccggcatgggcctgtcggtagaggccggtttgctcggcccgctaggtgtgcaggtggggcatttgtgggcgaccctgagcattttcggggtgggctcggcgatcctgtatctgctgctgttgttcagtggccagcaaaagggcccggcgctctccgaactgccgcgctggcagttgatcggcgggttcctggggccgatctatgtggtggtgctcaccctggccacgccacatatcggtattgcgatgaccatgatcgcgattttgtccgggcaagtcggcaagagtgtgctgatcgaccatttcggctggttcggcgcggcgcgcaagcgggtcaatggcgaacgctggattgccctggcgttgattgtggtggcacttgttctgattgcacgaggttaaggcgatgaatctgattctgttactggtcgtggtggttgccgcaggtgcggtgttgagcgtgcaggcggcgatcaacggtcgcctgggccaggcggttggggtattgcgtggcagcctggtgaccttctcggtgggggcgattgtcaccgcgttaatgattttcttctttgaacccgtccagacggtgagcctgctggacgtgccgaaatggcaactgaccggtgcgttgttcggtgtggtgtacatgatggtgatggtcggcgcggtgccggtggtcgggacggccgtcgccaccgtcgcggtgatcgtcgggcaattgggcatgggcatgctgatcgacaacttcggctggctgggcaacccggccatcgagctgtcgagcagccgcatcgtggcgatggcctgcctggcgttggcgctggtgttcatgtaccgcagcaatacccgcaccgactgaggggttgaaccatcgacggcgggccgcagtcactgcttaaggtgccggcgcccgccgcaccgagacgaccatgaagaaggagtctgaccatgccagataaaacctgtgcctgcccacactgcaaatgcgtgctgggacctgatgcggtcatgaaggacggcaagggctattgctgtcagggctgtgccgagcaccatgcccatggtgagccgtgtgcggctgcgacggggtgtgagtgtgccaagtctgccagaggctagcggtgtttgaaccggtgggagcctgcgtgctcccacacggtttaccggccgcaaaaatcactcggattgtcgtgccgcggtgattaccatagcgactctccctcgaatgatgtgcaccccatggccctggccgcgccgcctgacctcagtgatcctgccgttcccgtgcaacccctggcgcgcacctatccgcgcgggctctacgttgagccccacagccacgactggggccagttgctctatgccatgagcggcgtgatgtgggtcgagaccccgcaggaagcgctggtggtgccgccacagcgtgccgtgtggctgccgcccggcgtagagcatggtatccgcgtggtctcggacttgcagatgcgcaatatctacctgcgcccggccctggccgcaacgctggacagccaggtgcaggtgatcgaagtcggtgggttgttgcgcgagttgatcgtcacgttggtggacgagggcgacaacggtgaggtggcgtactacgacgcgctggtcagcctggccttgctggagctgcaacgggcgcgccgctcgccgattcgcatcgccatgccggtggaggccgaccgccggctgatcaacgcctgccaggcggtcatggctgcgccgtcactggagatccctttcgagcagcatgccgaaaccgccggtgccagcgtgcgcaccctggcgcggttgttccagaaccacctgggcatgggttttgccgaatggcgccgccaggtgcaactggccacggcggtggcggagttgatccagggccagtcggtcagcgccatcgcgcgttccctggggtattcgcccagcagtttcagcgacatgttccggcgtgaactcggtgtggcgccatcgcaatacctgggctgaggggttggccgatagcctgaagcacttggccgatgcttcaggcatgcgctctctacactgagcgcatccacccacaaggcgctgccccatgaactacctcatttcccttgccatcggcctgtttgtcggcgtgatctacggcgcactcgacttccgctcgcccgcgccgccggccatcgccctggttggtctgatgggcatgttactgggcgaaaagctctggcccatggggcggcaactggtgggcacctggttctcctgatctctttttatttgatggatattggccatgaaagcactgcaatttactgccaccggcgacctcaacaccctgcgctttgtcgacgtcgccaccccggtgccggccgtgggggaagtgctggtacagatcaaggccgcgggcctcaaccccagcgacgtcaaaaacgtgctcggtcgtttcccctacaccaccttgccgcgcatccccggccgtgatttcgccggggttgtggttgaaggttcgcaggcgctggtgggccaggaagtctggggcaccggccgtgacttgggcttttttgccgacggttcccatgcccagtacctcaccgtgtcggccaagggcgtggcacataagcctacccacctgagtttcgcccaggccgcgagccttggcgtgccgtacaccaccgcctgggatgcactggagcgcagcggcgtgacccacggcacacgcctgctggtgatcggtgccaatggcgcggtgggcagcgcggccctggccctggcaaaaatccgtggtgcccaggtgctggccgccgtgcgtcgcccggaacaggtcgacgtcttgcagggccagggcttcgacgcgattgccctgggcaagccggaagagctgggcacgcaggtcaacgccgtgttcaagggcggtgcggatgtgatcttcgacaccaccggcttctggctgccggccgccgtggcaggcctggcgcccttcggccgcatcgccattatcgccgcgccggtggacggccatgtacaactgccggccctggcgttgtaccgcaagggtggttcggtggtggggatcaattcgttgctctacaactgcgagcagtgcgccgtgatgctggagcagttcgggcggttctttgacgaaggcttgttgccgttgcccaccggcctgcgtgaagtggcgctggccgatgggctgcagtgcttcgaagaggtgaaccagggcagcgcagacaagatcatcttcctgccttgatcctggcggtcatgcctcgggaacgcctttctcccaggctgaccagttcttgaggattgcctgtaccaatgggttgcccgtgcggtacaggttctccagcgccgggacaaaaccgccctggtccgcgtacttcaacaggttatccacttcgctgtagcccgggtacggccggtcgaaatccgaaccggcgcgcaccaccgccaggcgctggatgtccaccaagccttcgcggctggcgcgcaacagggcctcataggtggagttgtcttcctgctgggtggtgcagtactcgcctttgttgtcggtcagcagcttggtccacacctcggcgcgctcgctcaagcgtgtgccggaaaaccaggtgttgcccgccagggtgtcgcagcgggtgacttgcggcggctggttggccggcgcggcggggtagtgtttgcgccaggcgctggattccttgctttccgtcagctcgactttctgcgacagggcaaacgccttggcctgcaacttggggttcagctcaaacacttcggtcttgtagtccagcggtggtttttcgttggggcccttggtgttgatgcccagatagccggtcggccaatccttcggcgcatcccgcgaatccagctcccactgggtgccgaattccaccaggtaatgtgcccacgcggcggtgccgatcgtgccgtgcttggggctgataccggcgatcccggcgatcaggaagtagctctggcgcaggtcgaacttgggcgacagcgccaaggccagggtggaggccgcggcgttggtctggcccatgccggtgaccagcaggcaaacatcctgggtattgcagcggatcaccggatactcggcagacaagcccggtacgcgcacttcctgcttgagttccaggcggtcgatccaggtttgcgcctcgggggcgaacatggtgatcagcatcaccttgggcttgatcggtgcgggtgcgtcggccagcaccacttgaggcagaacggccaggccaacagccattgaaagacgggtaaacgcgttcatctaaagctccttgatcagaattgatagcccacgccggcgtagtaaccccagccgtccgagcgggcgcggaaattaccttcaccgaaattcaactcgctgccgtcttcccagttgccgccgttatgaaagtaacggccgaccagggtgaaacgcaggtgggtgaacgaatacagcagcacgttggtggccaccagggaattggccgtgcgtgccgggttgtccttgtgcaggtccgagccaaaatcgtagttggtaaagccgatgtaggtcagcgaagcgccgttatcgaatttgccgatgggcacgatgtacttcatttgcgcacggtagccgtcccaggaatattcgttgctggcgccatagttttcccactggtaacgcccgtagaagttggccgacaggttgacccgcgagtgggtgtcgatatcggtgcccaggccgctgtacagcgtatttgcgcggttggccttgttgctgccgtggtcgtagatccagtcgaaggccacataccattccttgaacggcccgatggccaggctgcggcccgccaggtagtcgatggaaatacgcggctcatgttccatgaacaccggcgagccatggtcccacacgcccttgtcattactgttaccgatggtgaggatcttcggcacgtcgatatagccgtacagctcgaaaggccccttgcggccgaagtactcgtactccagatagacgtcatcctgcggcttggggccgaagctgatgtctttgctgccgatcaacgtcaggtcctgattgaaccagtccgacaggtacacaccttttttcgccgggctggcttcagggctgagggtttcgccctgtgctgagtcatcgatgggtttttcctgcgccaaaaggggcgcgctgagtagtcctgtaacggcagccagtagcaaggaaacaccaaaggaggtaggacgccttgaggtgaagtgcattgaaaatccctattcgtacgcggtttgaacccgattcttcgggtggaggtgaacttggttgccaagttcgtaccgcaaacgtttgcacaggctgtaccaactttgctcaatcgattgatcagcttggaaaaaaactaaattagtcgaccttttggtcaaaattgactgggtgtcatttttcaaggcgttggaacaggtgcatcgcggtttcccgccgatagtcactcggcgtttggttcatctcgatgcgaaagtgccggttgaaattggacaggttggcgtagcccacttcaaagcagatgtctgccaccgacatatcgctttgcagcaacaaccggcaggcgcgctgcacccggaacttgcgcatcaggtcgataaaaccgtggccggtgttgcgcttgaagaagcgcgaaaagcccggttcgctcatctccaactgttgcgcgatcaccgacaggcgcacatcgccggtcagctcgcgcatcaaatagtcgaatgccttgttgatgcgttccgcgctgcgcgcatccagggtcggcgcgtagcaggggctggccagggccttgacctgttggggcggggcgtttttcagggtgtcgagcaattgcaggaacaggatcaagcgttgcaggccctgggcgttaccgatggcttccatccaatgcgcggcctgcagcgccgtgtcgccggtgaactccagtccacggcgggcctgttcgaacaacggctgcaggtcgccgagctccggcagggttctgcgcaaggcgaggagggcggcgccgtcgaattgcagcaccacgtcgcggccggtgaggtattcgccgggggccagttcgccgatccagtcgtggggcaggtcggggccgatcagtgcgacatgcccggcgctgaaggcaccgatgtagtcgccggccaccagtttgccgctgccttggcggatcaagtggatttcgaattcggggtggtggttccagcgggccaggtcgtagggatagtcatgttcgaaccagcggaagcagtggtccggctcgggcaggatcacttccagttcggcggggcggtgctcgaacagcgtggcacggctgatgggcatgagcgggcttcttggggttcttgtaatcgcttcaaaatacgcgcctcgggcgttcaggcgctacccccgcttgcgtccggcactgatacttttttaactcgcgcgtccccggttaaaaaagtaccagtcgagcatccgtcacgggtttgtgagtgcctggccaagctgctgtaatcggcgctcaacaacaaaaacaacaggtggaaaccgccatgttcaagctcccgcaagcgttgttcctgctgtccggcctggcgttggccatgcccagccacgccgccgacaccgtcaccatcgccacggtcaacaacagcgacatgatccgcatgcagcgcctgtccaaggtgttcgaagcccagcacccggacatcaagctcaactgggtggtgctggaagaaaacgtgctgcgccagcgcctcaccaccgacatcgccacccagggcgggcaattcgatgtgctgaccatcggcacctacgaaaccccgctctggggcgccaagcactggctggaacccttgacccagctgccggccgattacgatgccgacgatatcttcccctcggtgcgccagggcctgtcggtcaacgacaccctctatgccttgccgttctatggtgaaagtaccgtgacctactaccgtaccgacctgttccagcaggcgggcctgagcatgccggcgcacccgacctggacccagctcggcgagttcgcgtccaaactcaccgccaaggacaagggccaatacggcatgtgcctgcgcggcaaggccggctggggtgagaacatcgccttgctcagcaccatggccaacgcttttggcgcgcgctggttcgacgagcagtggaaacccgagctgaccagccccgagtggaccgcagccgccaacttctacgtcaacaccctcaagcagtacgggccgccgggcgtgtccagcaacggcttcaacgaaaccctggcgctgttcaacagcggcaagtgtgcgatctgggtcgatgccagcgtggctggctccttcaccaccgataaaagccagagcaaagtagccgacagcgtaggtttcgccgccgcgcccaccgaggtcaccgataaaggttcgtcatggctctacgcctggtccctggcgatcccggccacctccaagcacaaggacgccgccaaggcctttatcagttgggcgacctccaaggactacatccagctggttgccgacaaagaaggcatcaccaacgtgccgccaggcacccgccagtccacctataacgaggcgtatctgaaggctgccccgttcgcccaggtgaccctggagatgatgaaacacgccgaccccgcgcacccgtccgccaagccggtgccgtacgtcggcatccagtacgtgaccatccccgagttccaggccatcggcacctcggtcggcaagctgttctcggcggcgctgacgggtggcatgtcggttgatcaggctttgctgcaagcgcagtccactaccgagcgcgagatgaaacgcgccggctatccgaagtaacttttgacgggacatacccatgaaacgactggaaggtaaaagcgcgctgatcaccgggtcggcgcgcggtatcggccgcgccttcgcccaggcctacatcgaagagggcgccacggtggccatcgccgatatcaacctgcaacgggcccaggccacggccgccgaactgggcgcgcaggcctatgccgtggccatggacgtcaccgaccaggcctccatcgacggtgcgattgcggccgtggtggcccaggctggcaagctggatatcctggtcaacaacgctgcgctgttcgacttggcgcccatcgtcgacatcacccgcgacagctacgagcggctgttctcgatcaacgtcgccggcacgctgttcaccctgcaggccgcggcgcggcagatgatcagccagggccatggcggcaagatcatcaacatggccagccaggccggacggcgcggcgaaccgctggtggcgatctattgcgcgaccaaggcggcggtgatcagcctgacgcaatcggcggggttgaacctgatcaagcagagtatcaacgtcaatgccattgctcccggggtcgtagacggggaacattgggatggcgtggatgcgttgtttgccaagcatgaaggattggcacctggcgaaaagaagaagcgggtaggggccgaggtgccgtttgggcggatgggcacggcgcaggatctgaccgggatggcgatcttcctggcgtcaaaggaggccgactatgtggtggcgcagacctacaacgtcgatggcggcaactggttgaactaggacccaatgtgggagggggcttgcccccgatagcggttgggcagtcacagttgtgcaatctgacccactgctatcgggggcaagccccctcccacagttgagcctctttgttcgttgactcggggctaatccgcaaagctgcggtcgaagaagtaaacctctccaggcttgaggttctccaccgttgcctggggcctgccgccttcaccctgtttcttgcgcccggtctcacgcaagtacccggcctccgccagcttcaacaaccgctggcgaatactggtcttcaacactggccgcgccagcaccagggaaaaaatcgtggtcgcttccggcgcactgaattcattgcccagaaacatcagcggcacgctgctgtacaacgacttggaaaacaaacgttcctgcaccttcgccacaatgctgttgtggtcgaacggcaacttgatgccgccactcgccaccgccgtcagcgaaaaccagccctggtgctcacccagcgtcacgtcctcgttcacgatcgccaggtaatgggtggacgacgaccagcagcgcggatcgcgaaacgcatcccccaccgtccccacctgttcgctccaggccaggtccagtccgaccttgtcacttgctcgcaagcgctccaccgcatcctcgaggctcagatcttgcacgccgccattcaccaccacccccggcaacgcccagtgcccggcgaagggctcggcgtcgcgctggttcagcagcagtttcagttcgccagaggcacggcagtaaaacagcacgcacaggtcgacggtatggaggtaggcgctacggggcatgtgatgtccttctaaacagcagtgcggcacagtctaacggatcgaacagatatgtcatgtactgactccaggatagataagtaaatgtttcttgcaatgaaagtacatgacgtgtacttttgtttccaggccacaggagaaccaccatgaccctcgcgacaactgccattgcctcattcgacgtcgacgcccagaagagcttcacgccgctgtgccccaacgagttgccggtggccggcggtgaccggatcggcgccgagctcaactacatggccagccttgccggccatcgtatcggcagtaaggacgcccacaccccgcacgcgccctgggtggtggcgcagcacagcgacatgttgcaacccaccggcctggaccacgccgatgtgacctgggtgagtcactgtgtgccgggcaccgaaggcttcaacctgctggacgagttgcccacgccctatgactacgactacttcatctggaaaggcgtcgaacccgacctgcatccctacggcgcctgctaccacgacctgcacgacaagctgtccaccggcgtcatcgagtatttgaaaggccaaggcgtggttcgcgtgatcgtcggcggcctggccctggattactgcgtcaagaccaccgcgctgcagttgctcaaggccggcctggaagtggtactgcacttgccggcgtgccgaggcatcagcgaggagggcggtgtacaggcggtcaatgagttgctcaaggccggtgctgcgatcagccgcacccgcgaagaactggccgcgatggccacgcgttaaggagaaacaccatggaaagtgcctacgactacgaatccccggtgatccagggtttgctcgacaccgattactacaccttcaccatgatgcaggcagtgttgcaccagtaccctaacgtcgatgtggaatacaacttcatcgtccgctccagggaaaaactcggccacctgattcctgaaatccgtgccgagctggagaaactcgccagcctgcggatgcgcgaaggcgaactgcgcttcctgttcaaccctcgttttcgcgaatacctcaccccggattacgagcgcttcctcggcttgttccgattcaacctgcgctacatccacgtcagtgaagtcgacggccaactcaacatccgcgtggttggcccgatgctgcactgcatcatgttcgagcaaccggtgctggcgttggtcagcgagctgcgcaaccgagacaaataccccgacgtgaccctggaagacgtcacccgcaagctctaccagaagttcgactggctggagaaaaacctcagccgcgatgaactggccgacctgcgtgtgtcggacttctccacccgtcggcgcctgtcgttcaaggcccagcgcgaagtggtggacatcatgcgccgcgacttccccggccagttcgtcggcaccagcaacgcgcacttggcctacgaattcgacctgccgctgatcggcaccatggctcaccaatggctgatggtgcaccagcaactggggcgcctgcgcgagagccagaacgccgccctggaaaactgggtgcgtgagtaccgtggccgcctggggatcgccctgaccgactgcatcagcaccgactttttcctcaaggacttcgatctgtacttcgccaagctctacgacggcctgcgccaggactccggcgatcccatcgtctgggccgacaaggtactggctcgctacaagcagctgggtatcgacccgatgaccaaggacctgatgttctccgacggcctgaacttcgaaaaatgcctgccgatcctgcgtcacgtgcgcggcaaggccaagttcggtttcggcatgggcaccagcctggcctgcgatgtggacggcgtggagccgctgagcatcgtgatgaaactggtgcgggtgcacggcgagccagtggtgaaattctccgatgacccgatcaagaacgtctgcgaagacgcctcgtttttgcagtacgcagcacaagtgttcaacgttggcagtgtggaggtgtgacatgcaagaacgtatcgcacgggaactgaacatcaatcgcgcgttgacccaaggcggcgaacccgaggaaatccaacggcgcatcgacttcatcaagaccaccttgcgccactcaggctgcaaggccctggtattgggcatcagtggcggcgtcgactccctcaccgccggccgcctgtgccaattggcggcagagcaactgcgcagcgagggctacaccgcacgctttatcgccatgcgcctgccctacaagacccaggccgatgaacgtgacgcccaggcctccctggacttcatcaccccggaccacatcgacaccctcaacatcgccgccagcgtcgacggcctgatggccagcctggccgccgccgaagccagcgccgagcatgtcgatttcatcaagggcaacgtcaaggcccgcacgcgcatgatcgcgcaatacgccgtggccaacctgcacaatggcctggtggtgggcaccgaccacggcgccgaagcgttgatggggttcttcaccaagttcggcgacggcgcctgcgacctggccccgttgtcgggcctgaccaagacccaggtgcgattgctcgccacggccctcggcgccccggccaatctggtgcacaaacacccgacggccgacctggaagaactggtgccgggcaagctggatgagcatgcctacggttgcacctacgcagagatcgacgcctacctgatgggcgaaccggtgagcgagcgggtgaggacgattgtcgagggggcgtacagcaagacagcgcacaaacgtgcgctgcctatcagtccggcttgagttgacgatcagattttgacgttttcgcggatgttccagccgaaccgaatcggcccgccatcctttccgccatcggccttctggggctgatagctgacttcgatcctggcgaagttaaggctgatttcctctgtcagtaggtcatgggttgtcgctgcgcgcgtgtcgtaggaggcgaccatgacttccttcaaggtgatcaccaggtattccacgctgttatcgcccccagccttgcgtaccacgatgcgcgcttcgggataatgcttgccggttgcgcaggccatcatcaggttgggcgaggatttatccagtgacttttcaatcgcgatattggccatatccaccttgccggcaccaccgcctgtaccactgtgcatcgagcctgactgagtcatcctccagccccagcgggaaatatcgatttcatcgcgatgcgcctggtccctggactcgcccttgatgtcccccagcttcaaaaacatatcggttgccatgtccgctccttgtcttgtcatccgccggtagtggcgcggggcgtacttttccgattccgacgattgaccgcaagacgctaaggcgagaacgggaagtgcctgtctacaaaaaggaaactttccgacattcttgccggatattgattctttacgctctgcgctcttgtgaattcaggagtcaaggaatggcgaccagtgtattgagggacggcttccccagtgcccacctcgcgacgcgtgaacgggtggaaagcagcattgatctacgccggttgtttgcggctatcgacgccgatccggcgattgccggggcgggggtggtgtatctcgattccactctgtggccggtgacgttgcgtgagtttcaaccgatttgcagcgtgttgcccaagcgggtgatcttgcgggaaatgccggcttcgatggcaaggttggattttgtgcgcaggttggagcatgagccacgggagtcggagcttgtattcgaggcgcttgggatgggattggcgtgtgggagtgtggttttaggttggattgtcgcggtcagtggcaccgttgccattccattttcggctggcgccagttcagtgattgccgctgttggttatacctctgctgcagcaagtttcgttcaatgtgtcgttgggggataccgtgtgtacaacgagctcaccgagccttcgaataacgaatcattggacagtgatcgctggtaccaacacgtaaccgctgcattggacgcagtcgcactggtgggtgcaagtacctcgttcctaacaaccctgagattggttaaagcaacgaaggtgagtaccggaaagaattggcagcaggtattgagggggcttacccgacaagagcgagcgaagctgacgaaggagttactgagtatccagcatccacatctatcttcgaaaatgttgaggttaaggcagctggaaggacatttacctaagcgactgacaccagcacagttgcgccacgcgacagtaactcaaattaaagatgttctaggtgcatcaatgactgtgatgggcagtgctgtatccggcaatcttcacacaattgccgtaggcctccatgaggagtttgaagaatgatctttctgatgacgcctgaggaattttggtgtttcctgaaacgttactttccggttcttatgggggcgctttttgctcaaggctttgccgttgcaatcggcgtaccgatgatctttgacggttactttcatggattacctattgccgacaatctcaaatattcctttttttcagttctcggtttggcttttcttattgcccactgcaatttcatggtcgtgcgtggctatccaggttggttatggatcccggtgatcctgatggtattaagtctgttcggtgttttaccaacagtcgaataccaccctcacaaggtgttctatgtgctaggccttttattcccgctgatggctctgttgctgctcaatagtaaacgtcaccgagaagctcgagctgaatgggtaaaacttcgtcaaaagcgtcagcgtatcgcgaagataatccgtacccagcgtcaacgagttaggcgccgggcaggattatgaaggcctaccgctcgatcgaccgactccaccgcgcattccactccggccgtgcctggttgacctggtcccaatcgatcgaaatcgccgtctgcaagtaaccctgcatcgcttcgacccgcgcacgggtcttgtcggtggtcggcgtagtcgggttcgaggggatctggtcgccttcttccagcgcaggggcctgggcttcggcggtcagcaggaaggccgcaagtttctgcgccagttccggctggtcattgcgcgcaatcacgcattcggccacgttcagcaccaccgcgccttccttgggctgcgcgtattccatgggcacgccgagcagtttctgggtggcgacctgggttggggtgagggggaagatcgcggcttcgtcggtctgcaccatctcggagattttcgccgagctggcgatgtattccagcacgttggggccgacggtctttggccaggccttgaagccgggttccacgttggtttcgtcgccgccctggatgcggttgaacatcaggaaaccgtgcaggccgaaggtggacgacgccagggactggaacaccactttctccttgaagcgcgggtcggccaggtccatccatgaagtgggcgcggcccagcctttttccttgaacattttcgcgttgtagcccagaccggttacgccgagggtcacggctacggcttcgtccttgatcttcgccttggccgggatctgctccagggtcgggctcggcgccagcttgtcgcacaagcccatggagatcgcgcggtacatgatgccgtcgtcgaggaacatcacgtgcatctgtgggttgtctttgttggcctggaccttggcgaggatgtccgacgaggtgccgggcacgatcaccaccttgacgttattcgctttttcgaacgcgggcagcaccttgtcggcgtacacccgttccatggtgccgccgttcatgcccaggtacagcgtgggcgcggcgtgcgccgttgaggcgagcagggcgagggacaagcaggacagcgcgatacgtgggttcatggatgtttttcctctcaggcttggaaacgacggatggaaaacgcttcgatggggtggcggctggccccgctgcagacgatctctgccagggcttcaccgaccgcgggaccgagctggaacccggcgccggcaaagccgaaaccgtggagcaagccgggttgggtgctgctggggccgatcaccggttcgtgatcgggaaggtaaccttcggtgccgctccaggtacggatggcctgggcgcccttgagaaaggggtagagttcgccggcgttgcgcaggatctccagcaccgccgcctgccctgggcgcgcggtcagcgggccgagggcaaagccgcgaccaccgccgaggatgcaattgcccctagcgacctgccgcgcataaatcccgccaccttcaacgccggtgctcacgttcatcaccaccggcaagggctcggtgaccagcatcgccggatgcgccgaggtgatcggcaccgcttcgccaaactgcgcggcgacgcttccggcccaggcgccggcgcagttgagcagccatggcgcttgcaggtgcaggccgttggcgcagttcacctggaaccggcggctgtcatgttcgatgcggatcacctcggcctgctcgtacacgacggcgccataacgctgtgcggcacgggcgaaggcaggagacaccaggcgcgggttggcatgtccgtcttccgggcacagcgaggcgcccacggcaatatcgccgacccaggggaagcgtgcgcgcaattcggcgtagtccagcaactgcaggcccaggccaaagccacgggtctgctcggcgtacgcctgcaacgcggcgaaatcggcatgactgcgcgccagcttcaaatgcccggagcgcacgtattcgccgtcgatgccgatcaaccctggcaagtcggcccacagttgatgggcgcgctgggacaatggcagttggtgcaagggccgaccctggcgccgcacgccgccatagttgacgccactggaatgcgagccgcaaaaatcccgctccaccaaggccacgtgctggcctttctgcgcgagcatcaaggccgccgaggcgccgacaatgccgccgccgaggacgatcacgtcgatcatggctgcacctccacgccaaacggcagcggcttgatcggtgcctggccgcgcaggcggcccacgtgttcaatggcgcggccgctgcgttcggcgacaatctccgccgccgccagcccacacatccggccctggcagcggcccatgccgacgcgacagtgggccttgacccggttgagctcccagtggccttcatccaccaccgcgcgtatctcgccggcgctgacttcttcgcaacggcacaccattaacgcgtccggcgcctgggccgcccattgctcggggaaggggaacgcggtttccaacccatgacgaaaacgctggatgcgcgccagttgctgctccaatacggcggggcggcgctgatcaatcgccacgccagaatcttccagcaccgccaatgccgcacgttcaccggccatttgcgcggcgtccgcacccatgatgccggccccatcgccggccaggtacacaccgtcgacgctgctgcgcccggcgttgtcccgttgcggcaaccaggcacggttcaaggtgttccaggcgaactcacagccgagcaagtccgccagttgggtctcgctgcgcaacgcgtgggcgaaagccacggcgtcgcattccagacggtgttcaccccaacgaatgccgctgactcgctgttctccgtcgatcttctgcagcgtggcgccctgatgcacggcaatcccatgggcgctcagccaggcgcggtaatacaggcccttggccaaggtcagtggttgcccgagtagcgccggcagcgcacggcactgtgcactgaacggcgcgctgtcgagtaccgccaccaccttggccccggccttggcatattggtaggcgaccagatacagcaacggcccgctgccgcagaacgccacgcgctcaccgatggcgcagccctggtatttcaaggcgatctgcgccgcgcccaggctgtacacgccgggcagggtccagcccggcaccggcaggatacggtcggtggcgccggtcgcgacaatgatcctggtgtattcgacgctctcggcccggccgttgttgagcatgtccaggcgaccgtcctcggcattccacaccagggtttgcggtcgatagtcgatcagcggcgccagctcatctatcgtgcggtgcacggcttgggccttgctcgcttcaaatccgtagatctgcctggcggtgcgctggaagcccaggggttgccgccgatagatctgcccgccgccgcgcaggctttcatcgatcaggcacggtgtgatgccatggtcgagcagggtgcgcgccgcgctgatcccggccgggcctgcgcccacaatcaccaccggcttcatggctggcgccccgggtcacggctgatcgcctggccttcttccagcagcgtcgagcaggcgcgcacgcggcggccgtcctcaagccgcacccagcagtcctggcaggcgcccatcaggcagaaaccggcgcggcgctcggcgctgaagtcactgccgcgcaggtgttcggcgcaggtcagcacggcggtgagcaaggtatcgccaagcaagccgctggcgggttgaccgtccagggtaaaggacagggcagggcggccggtctcggccacacgtttgaacaaggccatcaatgtttccccaccagcacgcggtccaggccgtagacccggtccagcagaatcatggtggccgccgtcaacgcaatcaccagcgccgacaccgccgccatcatcgggtcgatggactcggtggcgtacacatacacgcgcaccggcagggtttgcgtggccggcgagctgacgaagatcgacagcgtcacttcatcgaaactgttgatgaacgctagcaaccagccgccggcgacaccgggcagaatcatcggcagggtgatctggcgaaacagcgtaaagcggccggcccccagggattcggcggcctgctcggcactgcgatcaataccgatggcggccgccagcaccaggcgcagcacatagggtgtgatgatgactacgtgcgcgagcatcagccaggtgaagctgccgttgacgcccatcaatgcgaacaagcgcagcatcgccacgcccagcaccaggtgcgggatgatgatcggcgacaggaacaacgcgctgaagaagttgcgccccgggaacgtgtaccgactgatcgccaacgccgccggcaccgcaatcaacgtggccaggctggctgcggtgaaggccaggaccaggctgttgtagaacgcctggataaagtcggcccgctcgaacaccgcgcgaaaccagcgcagcgagaagcccgaagtgggcaggctcaaggtgttttccggggtgaacgccaccaggcacaccaccaccagcggcgccatcatgaacagcaccaccaagccgtggaaaccgagggccaaaggaccgtttctggacatgcgcttaaacccccagggactttttatagcggccttcgaccatgcggttccagctcagcatgatcagcagattgaccaacagcagcaccaccgcgatggtcgcgcccatgggccagttgagttccgagaggtactggtcgtacaccacggtggcgaccattttcaggcggcgcccgccaagcaggccggggatcgcaaaggagctcgcggccaggccgaacacgatcagggtgccggacagcacgccgggcatgacctgcggcagcacgatcttgcgcatcaccgtggcctggctggcgcccagcgacaatgcggcctgttccgccgacgggtcgagcttctgtagggaggtccacaccgggatgatcatgaacggcagcatcacgtgcaccagcgcgatgatcaccgcgaacggcgtgtacagcagcttcaccgggcgcccgccgagcagttggatcagttggttcaccaggccatccgcgcccaatagcaggctccagccgaaggcgcgcaccaccaccgaaatcagcagcggcgtgaggatcaggatcaggaagatcgagcgccacggcgtgcccatgcggctgaggatgtaggcctcgggcacaccgatcaccacacacagcagggtcaccagcgcgctgatccagaaggtgcgccagaagatctcgtagaagtacgagtcgctgaacaatgacaggtaatgggccaaggtccattcatcggccttcacgcccacctggtagtcgaacacgttgaacgacagcaccagggtcaggcccagcggcaaaaccagcagcccggcaaacagcaccagcgccggcagcgacagcaggtaaccgcgactcatgcgtgcacctcgtcggctgccagtacgcgcagcaagtccgcatgccagtccaggcccactgccgcgccgcagcccagcggtgcgctgccatcgttgctgcgcaccacggtgatctcgccgaggtcggtgtggatgtggtacagccattggctaccaaagaagtaacgatcgagcaccttgccttgcaggcgaccggcacccgcgtccaccagcgtgatcttttccgggcgcaggctcaggaccagctcgccgtcgccgcgttcatgccgtacttgcggtatccccaactgatcgtaatcgccagccagcaggttggccttgccgacgaagtccgagatgaagcgcgtgcgtgggtgttcgtagagcttgtacggcgcgtcgatctgggtcacgcgcccggcctgcatcaccaccacacggtcgctgatggacagcgcttcagcctggtcgtgggtgaccatcaaggtggtgatgccgacggcgcactggatgcggcggatctcgaactgcatctcttcgcgaaggttggcgtcgaggttggacagcggctcatcgagcagcaacaccggcggttcgatcaccaacgcacgggccagggccacgcgctggcgctggccgccggacagttcccgggggtagcgctcggcatgctgggccaggcgcaccagttccagcacagttttcaccttgctggcgatctcggcggccggcaccttgcgcatcttcaggccgaaggcgacgttgtcgcgcacgctcatgtgggggaacagcgcatagctctggaacaccacgcccaggccacggctggcgggcttggcgtgggttatgtcgcgcccatcgagcaggatctgcccgccgctcacgtcaacgaagccggcgatcatttgcagggtggtggtcttgccgcagcccgaggggccgagcagggaaacgaactcgcctttttccaccgccaggtcggtggcgaccaccgcgtcgacggcgccgtagcgtttgctcaaggcgttgagttggagaaatgccatgtctgcgttccaccttttttgagtcgcgtcgaaacgcgcttttttgttttgggcagatgcgaatgagctgttgccggtgcgttggcgctcgatcttgagtcggctgccggttgttgttcatttcgcccctgtggacgcagattaggacgaagactaggatgggcggaagatggaatttcactgaacggactattattttcagatttattcactcaccggaatttaccaagagattgagtgttatggattccactgatcgaaatcaaagccgcaaagaagtcggggcgggcggggtgtctcgtctattcgcgctgttgcgcaccctgggtgacgtgccggagggcggcgaacgcgtcacccagctggcgcaacaggtgggtctgtcgcaacccaccacccatcggctgttgcgcagcttgatggacgaaggcatggtcgagcaggacgcccgcagcaagcgctatcgcctgagcctggagttcttcgccctggcggcaaacgcgagcaagaccggcaacctgcgcgacctggtgcgcccgagcatgctgcgcctgagtgcgtcattgggtgactcgctgttcctgctggcgcgcagcggcttcgatgcgatctgcctggaccgcagcgaaggcccgtacccgatccgcaccttcaccggcgatatcggcgggcgcgtggcattgggtgtggggcagggcagcctggcgatcctggcctttctgccggaggaagagcgcgaaaccgtgatccgctacaacctgccacggctcaaggacttccacctgtatgacgaagtgctgttgcgctcggaagtggagaacgtgcgtaacctggggtatgcggcgcgcaataccggggtgctggaaggcatggccgggttggccgtacccatcctcaatcgggatgggcacgcggtggcggcgttgagtgtggcgaccatcagcgatcgcctggggccgggccggttgccgatggtggtggagttgctcaagcgcgaagcggcggcgatcgggccacggatcaatccgtttgatccgacgttgcgcaggccctcacaaacctttggcggataacccatttcagccacgatgaagatcaaaaagtctgagcgggctggctcgcgagtgaggtgggtcagcccttgtttgtcggcgcagtgggattaatcatcgtttccggccttacccgttgttcgtactcttcggcgctgatcaagcccaattgcacggccgcctccttgggtgacaagccctcgtccgcggccttgcgggtgatctgggccacgcggtcataacccagcagcgggttgagcaccgtcgccatcagcaatgaatgctccacgttgtgtgccaactgcgggcggttcacctccaggccgctcagcagcttgtgggtgaacaggtcgacgccgtcggtgagcacgtcgatcgattgcagcaggttatggatcagcaccggcttggccacgttcaattcgaaggtgctcgaagcgcccgccagagtgatcgtggtgtggttgcccatcacctgcatcgccgcctgcaccagtacttcggcaatggtcgggttgcgtttgccgggcatgatcgaggaggtcaggccatcgtccggcacgatcaattcacccaggccgcagcgcggacccgaaccgagcaggcggatgtcattggcgatcttggtcaatgacacggccagcacattcagcgcgccagaggcttcgaccagggcatcgtgggtgcccatgccttcgaatttgcacgggttggtttcgaagggttcgccggtgagccggctgatttcctcgcagaacgccacgtcaaaaccgacaggtgtattcaacccagtgcccaccgccgtgccgccttggggcagcaggcaaaggcgcggcatgcacgcttcgatgcgcgcgataccgtgctggatctgctgggcaaacgcgccaaatgcctggccctggctcatgggcaccgcatccatcaggtgggtgcgaccgattttcagcacgtcctgccaggcgtctgccttggcgttgagtccatcacgcagatggcccaatgcaggcagcaggcgaccgcgcagttccagcacggtggtcaggtgcatcaccgtggggaaactgtcgttggacgactgcgagcggttcacatggtcattgggatgtaccggcgacttgctgcccagttcaccgcctagcgcgaggttggcgcggttggcaatcacttcgttggcgttcatgttggtctgggtgccggagccggtttgccagatcgacagcggaaagtgcaggtcgagctcgccgttggccagttcgtccgcggcctgttcgactgcctgcgccagggccggtgccagcgcgccgaggcgtgcgttggcacgggcacacgcgcgtttctggtggccgaaggcgcggatcaggctggcggggaacggctgtttgccgccgaacacctccagtgcccgctgggtttgtgcgccccagtagcggtcggctggtatggacaccgggccgaacgcgtcgtgttcgattcgctgagtagtcatcaggagcctcgttaaagcgcagcgccggcggcacggccgagcacgcgttgatattcaccctgggcggtctgctgggagaactcgccggaccatttcgataccaccaccgtggccacgctattgccgatggtgttgcaggtggcaatcgccatggacatgaagcggtacacgccgaacagcagcgccaggccttcggccggcagtacgccgatggcggtcacggtcgcggcgaacaccacaaagctgccacccgacaccgccgccgcgcccttggaggtcaccaacatgatcgcaatgatgcccagttgttgttcccagctcagcggcacaccgtaggcgttggcgatgaacagcacgcacagcgacatgtagatcgatgtgccgtcgaggttgaacgcatacccggtaggcagtaccagaccgacgctctgcttggagcagccgaatttctcgagcttttgcagcaggcgcggcagggcgctttccgacgaggcggtgccgagcacgatgaagatttcatccttgatataggtgaggaagcgccacaggctgaagccgctcaaccggcacacggcgcccagcaccacaaagatgaagaaggcgatgccgacgtagaacatcaacaccaggttggccagggacatcagcaccgctgtgccattgctgcccaccgcgtatgccaccgaaccgaaggcacccaggggcgcgaatttcatgatcaggttgatgaactcgaagaagcattcagagatacggttcaggccgtcctcgatcacttcccggcgctcgggcttcagggccagcagggcgaagccgaacagcaccgagatcaccagcacttgcagcaactggccgccagcgaaggcaccgacaaaattgtccgggaagatgccgtagataaagtccatggtcgaggcgggcgcatgccccttggctacggcggcactcgcggcggcggcagcggcgctgctcgggtgggcgtcatgcatgccggagccgatctgcagcaggttgccccacaacaggccgatggccagggcgatggtcgacaccacttcgaagtaaatcagcgcgcgcaggccgaccttgccgacccgcttgatatcaccggccgaggcgatgccgtggaccactgtgaaaaacaccagcggcgcgacggcggtcttgatcagcttgaggaagatatcgccgaggatcttgaaactggcggccagctccggagcaagaaagccgaaggcaatgccgaggaacatggcggcgacgacctggaacgtcaggtccttgtagagcggttttttggcgggggtggatgacatgtctgtgatctcattgttgttatggttcggatgacgctctgtgggagggggcttacccccgatagcagggtgtcagccacctgatttttcccggatacaccgctatcgggagcaagccccctcccacagttggacctccattggttttcaggtcagcgggggaccgcgccctggcgcgccagcgcgatatccaccatctgcggcgccagccccagatagttggcggggtcggtcaggcgttgcagttcggccacatccaattgcgcagtggcttcgccctgggcgagcagggcgtcgagcaggctggtgccctggtcgttggccatgcggcacgcggcgtacaccacatcgtgggccacctggcgaccgagggccggggcgaggcccatcatcacggcttcggcgacgatcaggccctgggtcatgtcgaggttcctgcgcatgcgctcggggcgcacttccaggccggcgagcatgaaggtcgcctggccgagggacgcggcgctgagggcgaaagcttcggggatggcgatccactccgcctgccacgggccggtagagcgttcgaagtcctggatcatcgcgtcgagcatcagcccggcgtgttggcgcacgcccttggcggcggcatacatcagctcgcaggaaatcgggttgcgcttctgcggcatggtgctgctggcgccacggcccttgacgaagggctcgtacacttcgcccagttcgctggtcatcatcatcatgatgtccagggcgatcttgcccagggagccggtgaccaggccgaggaagttcaaggtctcggccagcccatcacgggccacatgccaggtggcttgcggcacgcccaggccgagttcggccatcaaggcttcctgcacctgcaaccctttgtcgcccagggaagcgagggtgccggccgcgccggcgaattgaccgatttcgacccgtggacgcaactccaccaggcgctcggcgtggcgatcaaacatgctcagccacaccgcgcacttgtagccgaaggtgatcggcagtgcgtgctgcaagtgggtgcgacccgccatcggcgtgtcgcgatagcgcgcggcgaggccagcgagcaggccgcgcacggtctggatatcacgctcgacgatggccagcgcagcgcgtatttgcaggaccacggcagtgtccatgatgtcctgggtagtggcgccccagtgcacgtagcggccggcttcaccgcagatgttcgacagttgctccaccagcggcaggatcgggtaaccgactatctcggtctcgtgctgcatcagcgccaggtccagggcttcgtaccgcgacagcgcggcgatctgctcggcggcgtcgccggggatcaccccgcaccgcgcttcggcgcgggccagggcgacttccacttcgatgtaacgctcgatcagtgctttatcagagaacacgccgcgcatttcggcggtgccgaacatgtcgcggaacagggcggaatcaaaaacggtactcgacatgggcaaatcctaattgttatttttaaatcatacatatttaatatgtccgtacaatatgattgcgcctgtgctgatacactgtcaactcgactgcgagggtaaaaatggaaagtgtgagccagaggcgttatgcggcggtggccaaggacctgatcgatcagattggcaatggccattacccggtagggtcgttattgccgactgaattcgaactctgttctctgtacgcagtgagtcgccacaccgtgcgcgcggccatcgaccagttgcaggggcagggcatggtctcgcggcgcaagcgtgtgggcacgcgggtcgaagccgcttcgccccagggcgggtattcccaggcgatggcctcggtggccgacctggtgcaggtcgctgaaacccatatccgggatatccaaggcgtacgcgaattcgtcgtcgatatcgcccaggcccggcgcctgggactggagccgggtgggcattatttctgtgtgtcgagcatcaaggtcgatgccagcgccggcaatgcgccgctgtgctggaccgacgtgtacgccgaacaggcctttgccgaagtgatccccgaagcgcgcaagcacccggatgaactgatcgccgcgctgatcggcaaggcgttctcgcggtctatcgatgtggtggaccagcaagtgcggccggtgcagttgtcgaccgaactggcggccagcctcaaggcacagggcggggcgctggggctgaatatcatccgccagtatcgtgatgaaaatggcgggctgattgcggtgtcggagacggtctatccagcggaccgtttcaccctgaccatgcagatgaagcgcgacaagctctgatccatacgacgataaccttgcatctggtaaaactttggctaatatgacccgggtaaaacatatatcacccgggtaataaatatgcctacgcgcacacttcctgcttgtaccgcctttatccgccaccagcgtgtggcggcaggttcctatacggacgtcgccaagacgctcgccgagcttgaccagcccacgggcagcttcctggtcttcgacgatgccaccggtaaccaggtcgattttccctggcccgcaggctatgcgcccgaactaccaacccaggtcgacgtgaccgacgagcctcccactccccccttggtcggacgcccgaaactgggggtggtcgcgcgggaagtcacgctgttgccgcgtcattgggaatggctgggccagcaacgcggcggtgcttcggcggcgttgcggcggctggtggatgaagcgcgcactgcccatgcttctcgtgaccggatacgccaggccaaggaagccggctatcggttcatgagtgccgtcggcggtgacctgcccggttttgaagacgcctcgcgcgcgttatttgcctttgatgcggcggacttttcccgcaagatcgcgcactggcctgtagacgtgcagacctacctggcctggctgtcgcgcgacgcgttccctgtctgacaacaactcctggattcgaacctcatggacgtcacccagcaacggccgttgtggcagatctacctgatctttctggcaccgatggtgctgtccaacttcctgcaaagtttttccggcaccctcaacggtatctatgtcgggcagatgcttggcacccaggcgctggcggcggtgtcggggatgtttcccatcgtgttcttttttattgctctggtgatcggcctgggggccggcgcctcggtactgatcgggcaggcgtggggcgcgcaggaaaccgcgctggtcaaggtgatcactggcgccaccctgacgctgggcgcgttggtgggggtgatcgcagcagtactcggtagtctgtttgcacgcccggcgttgcaggcgctcggcacgccggtggatgtgctcgacgatgccgtgggctatgcgcagatgatgatgttgatcatgccgctgctgctggtctttattctctatacccaattgctgcgtggcgtcagcgacacgatctcgccattgctcgcgctgatggtctctaccctggtcggcctgctgctgacaccggcgctgatccgtggctggatcggcctgccgcccctgggtatccagagcgcggtctacgccgggttggtgggtaatgctgcggcgatgctgtttttgatcctgcgcctgcggcataagcatcatgtgatggcgccggatcgcgaactactggcggccctgcgcctggatcgggtcattctcggcaaggtcctgcgcatcggcttgcccacgggcttgcagatggtggtgttgtcgctgtcggaattggtcatcctcgctctggtcaatggccacggttcccaggccaccgcggcctatggcgcggtcacgcagatcgtcaactacgtgcaattcccggcgctgtcgattgccatcaccgcatcgatcctcggcgcgcaggcgattggtgccggccgcctggagcgcatcgggccgatcctgcgcaccgggctgctgatcaacacctgcctcaccggtgggctgatcgtgctcggctacctgctgtcccactggctgctcggcttgttcatcaccgatgacgcggcgcgggccaatgccgagcacctgctgcacattatgttgtggagcatcctggtgttcggtttccaggcggtggtgggcgggatcatgcgcgccagcggcgtggtgttcatgccggtggcgatctcgatcttctgcgtgctctgcgtggaactgccgatggcgtacgtgctcaacgcccacttcggcctggaaggggtgtggatggcgtttccggtgacctacctggccatgctggcgttgcagactgtgtattaccggctggtgtggcgacacaagcagatcaagcggttggtgtaaggctcaggccgcgcagcaacagttccaggctctgcaagccttgctccagccgctcgtccgggtgttcaccccgggcgatccacaaagcggtgttgagcaagcttccattgatcaactgcgccagtgcgtggctcggggcagggtggataacaccggtttgcatcaacgcctccaggcgttcgcgcagcgattcgacacagtgttgctgagagccggtgtcgcccagaacggctggcgcgtcctgcaacacaatgcgctggatctcactgtcttgagccatgcgcaagtaggtgcggcaacgttcgcaaaaaccgacccaggggtcggtggcctcagcggttatgcgctgcaggcgcgcatccatctcgctgtcgagctgggccaccacggccgccaacaagcccttcttgtcaccaaaatggtggtacaacgcaccccgggtcagaccggcgcgggcggtgaaatcgtccattgaggtattggcgtacccttgggctgcgaaagcttcgcgggcgctggcgatcagcctggcgcgggtgtcttcgatcatttcagcacgggctcggctcatgggtagggctcgcaatgggcaagtgatagattgacatacgctgcgtatgttacgcatgatttgtcacatacgcaccgtatgtattttgcctcgaacagtgcagatagcaagttccggggctttcagaaagaggtcacgcaggatggcaaacccttacgccgaattgttccaggtccctggcgcccgggcttttgtactggcggggatgctggcgcgcatgccggtctcgatgacggggatcggcttgatcaccatgctctcgcaggtgcacggcggttacggcctggcgggctcggtggcggcggtatttgccctggccacggcgttttgcgcgccgcaggtatccaggctggtggaccgctacagccaagggcgggtgttgccgattgccgcgtcgatcggcggcggggcgttgttgatgttgctgctgtgcacccacttgcaggcaccgaactggacgttgttcctgttcgctgccctggccggttgcatgcctaacatgtcggccatggtgcgggcgcgctggaccgagttgtaccgcggccagcccaagttgcagaccgcatttgccctggagtcggtgctggatgaggtgtgctttatcatcggcccgccgatctcggtgggtctgtgcgtggtgctgttcccggaagccgggccgctggtggccgcgttgttgctggcggtgggcgtcaccacctttgtgttgcagcgcgagaccgagccaccggtgcacgcgcatcaggggcatcacggtcgctggctgatcgcctcgccctcggtgctgatcctgatgatcctgctgctggccatgggcgtgatcgtcggcgtggtagatgtggtcagcgtcgcctttgcccagcatcagggccagccggcggctgcgagcatcgtactgtcggtctacgccatcggttcgtgcctggcggggctggcgttcggcaccctcaagctcaaggcgccgttgccccggcagttcctgttgtgcggcatcgccacggcgttgaccactttgccgttgctgctggtgaccaacatcgcagggctggcggtggcggtctttgtctccgggctgttctttgcccccaccctgattgtgtccatggccttggtggaacaggtcgtgcccgccagtcgactgaccgaaggcatgacctggctgatcaccggcctcagcatcggcgtggccatcggtgcggcgagctccgggtggatgatcgaccactttggcgccaccagcgggttctgggtggcgctggcggcgggagcggtcgtgttgggggcagcggtgttggggtatcggcggctaggatgatcagttgatcgcagggcaagcgtctgcgcagtgatgctgcagaaactcgttcaacgcttggcgggtcaggtcattgagcgtgacctttttgcgggttgccgccagcgccgccgccaggtgcaggtcatggccgacccggacattgaaggaacctttgcaaggtttctctggtgcatgccccagggtctggcaggtggcgaggtaatcatccaccgcctcacgaaaggccgtatccagttcggcgacggttttcccttcgtagctcaccagcgccttgatgaacaagaccttgccgaacaggcagttgtcttcgaggctggcttcgatggagccgatgtagccgttgtgtttcagttggttgttcactgaatcagctctcctgatttcaattgttcgatgatctggcgccgaatgtagtgtttcagttcgttgccagggtgaggcttgtgcaaggtgatcattgcactggggtcgccgatgtcgaacttgacgcggcttccagccccttcaatctgtgtgtagcccagccgacgcagcagcgtgacgagctcgggccaggtaaatgtcatttgctcgttgagaaatttggcgagcagcttttcatttttggacacggcgttccctgcgtgtaactaaatgtagttgcaaaaagtggtgttcgtcaatgctagctcgtgttcgggtggtcttcccgagattgatgtaacccttgatgacaccgtgcgccgcgcctgccatccccgctaatttttccctgtccggttcgttttatagggacgacgtgcctttgtgcttcctgcctactgctccggactccaagaaatgaatgctgaagactccttgaaacttgctcgccggtttatcgggttgcccctggaaaaacgccaattgttcctgcaggccctgcagaaagaaggcgtggatttttcccggttcccgattccggcaggggtggaggcgcaggatcgccaggcgttgtcctacgcgcagcagcgcatgtggtttctctggcaattggacccggccagcggcgcctataacctgccgggagcggtgcgactcaagggggcgttgagcctcggcgcgctggagcaggcgttcgccagcctggtcacgcgccacgaaaccctgcgcacagtgttccagcgccaggcggacgagcgcctgttgcaagtgccggcagatacctggttgaccgtcgagcacctggacctgagtcacctggccgccgccgcgcgcgaacaggccgtcaatgaggccgcgacccgtcaatccctgctggcgttcgacctggaaaacggtccgctgctgcgcgtgcaattgctcaagctcgacgcgcaggaacacgtgctgctgctgaccctgcaccacatcgtctccgacggctggtcgatgaacgtgctgatcgacgagttcatccgctgctatgacgcccacgagcgcaatgaagccccgcaactgccggccttgccgatccagtacagcgactacgccctgtggcagcgccgttggctggaagccggggagcaggcgcgccaactggattactggcaagcgcgcctgggcgatgaacacccggtcctggagctgcccaccgaccgcccgcgcccggccatgccgagctaccagggcacgcgccacaacttcgcgattgaacctgcgctggccacacagctgcgtagttgcgcgcaaaaacacaacgtcaccctgttcatgctgttgttcggtgctttcaatgtgttgctgcatcgctacaccgggcagggcgatatccgcgtcggcgtgccgatcgccaaccgcaaccgcactgaagtcgaagggttgatcggcttcttcgtcaacacccaggtcttgcgtaccgagctgaccgggcaaacccgcatcaatgagctgctgcaaggcatcaaggaacacgcactgggcgcccaggcccatcaggagttgccgttcgagcgcctggtggaagctctcaaggtcgagcgcagcctgagccatacgccgctgttccaggtgatgtacaaccaccagccggtggtggccgacattaccagtgtcagcaccgcctccggcctggaactggcattggtggagtggcaaggccgcaccacccagttcgacctgaccctcgacacctatgaaaaatccggcaccctgcatgccgcgttgacctacgccaacgacctgttcgacgcgccaaccatcgagcgcatggccgggcattggctcagcctgttgcaggccatggtggtcgacggtgagcagcgcatcggcgagctgccgatgttggctgcggatgagcagcaggtgctggtccacgggtggaaccagacgactgaggcgtacccgaccgagcgcggcattcatcacctgatcgaagaccaggcgcaggcaacgccggatgcgccggcgctggtgttcggtgcgaccacgctgacctacgcccagctcgatgcccgtgccaaccaactggcccacgccttgcgcgagcagggcgtcggccctgacgcgctggtggggatctgcgtcgagcgctccatcgagatggtggtcggcctgctcgccattctcaaggccggcggcgcctatgtcccgctggaccctgagtaccctcgggaacgcctggcctacatgatcgaagacagcggcatccagttgctgctcagccagcgcgccctgttgccactgctgccgaccgcgggcatccaggtgattgccctggaccagcccgcgagctggctcgacggttatagccgccagtcgccaagcgttgacctgcaggcgctgaacctggcctacgtgatctacacctcgggctcaacgggcaagcccaaaggtgccggcaacagccaccgtgcgttggtcaaccgtttgtgctggatgcagcaggcctacggcctggacgccagcgatgcggtgctgcagaaaaccccattcagtttcgacgtgtcggtgtgggagttcttctggccgctgatgaccggcgcccgcctggtggttgccgcgcccggtgaacaccgcgaaccggcgcgcctgatcgagaccatcgggcaacaccgcatcaccaccttgcacttcgtgccgtcgatgctgcaggcgtttatccatgaaccgggcgtgcaagcctgcaacagcctgcgacgcatcgtctgcagcggcgaagccttgccgctggatgcgcagttgcaagtgttcgccaagttgccacagacgggtctgttcaacctctacggcccgaccgaagccgccatcgacgtgacgcactggacctgcgtcgacgaaggcgccgacagcgtgcccatcggccggcccatcgccaatctcgctacgtacgtgctcgatgcccagctcaacccggtgcctgctgtggtcagcggtgagctgtacctgggcggcgccggcctggcgcgcagttaccaccggcgcccggcgctgaccgccgagcgttttgtgccgagcccgttcggtgacggtgcgcgcctgtatcgcaccggcgaccgcgtgcgccagcgtgccgatggggtgatcgaatacctcggtcgcctcgatcatcaggtcaagctgcgcggcctgcgtatcgagctgggcgaaatcgagacgcgcctgatgcagcacccctcggtgcgtgaagccgtggtgctggtgcaaggcggcaagcaactggtggcctacctggtgctggaagaccaggcgccggccgacctcaaggcctggctgctcgacagcctgccggaatacatggtgccgacccatatagtgcacctggccaggctgccagtgaccgccaacggcaagctcgaccgcaaggccttgccgttgcccgacgccgcgcctcagcaggcgtatgtcgccccggaaagcgacttgcaaaaagccctggcagtgatctggagcgatgtgctcggcgtggagcaagtcggtctggaagacaacttttttgagctgggcggtgattcgatcatctccatccaggtggtcagccgtgcgcgccaggcgggcattcgcctgagcccgcgggacctgttccagtaccagagcgtgcgcagcctggcgctggtggcgaccttcgagcaggcgcccctcatcgatcagggaccggtcaccggcgaggtgctcctcacgcctgtgcaacacagctttttcgagcaggcgattcctgcgcgccagcactggaaccagtcgttgctgctgaccccgcgagagacgctggagcccgtgcgccttgacgccgccttgacccgcttgatcaaccaccacgatgccctgcgcctgcgttttgtgcagcaggcggatagttggcggcaggctcatgccgagccggttgcgagcgcttcgttatggcagtcccaggtcgccggcgaggctgagttggccgcactgtgcgatgaggctcaacgcagcctcgatcttgaacagggcccgttgctgcgtgcggtcctggcaagcatggccgacggcacccagcgcctgttgctggtggtgcatcacctggcagtggacggcgtatcgtggcgtatcctgctcgaagacctgcaacaggcctacggcaacgccgcgttgccggccaagaccagcgcctatcggcagtgggcgcagcaattgcaggcccacgcgcagacgctggacgcgcaactggcgtactggcaggcacagaccgcaagcgccgacctgccgtgcgacaacccccagggcagcctgcaaaaccgcctgggcagcaccctcgaaatccgcctcagcgccgatcacacccgccaactgttgcaagacgccccggcggcctaccgcacccaggtcaatgacctgctgctgaccgccttggcgcgcgtcatcagccgctggagcgagcagcccgccgcgctgatccaactggagggccatggtcgcgaagacctgttcgacacgctcgaccttagccgcaccgtgggttggtttaccagcctgttcccggtgcgcctgcaagccgaaggcgagctgtcggcggcgatcaagtcggtgaaggagcaactgcgtgcggtgccgcataaaggcattggctacggcctgctgcgctacctcggtgcgcctgacgtgcgtgagaccttgtcgaccctggctgcaccgcgcatcaccttcaactaccttggccagttcgaccgccagttcaacgaagcagcgctgtttgttccggcgacccagggcagcgggcaggcccaggattgcgaggcgccgctggccaactggctgacggtggaagggcaggtgtacggcggtgagctggccctgcggtgggggttcagtcgcgagatgttcgaggtggcgactgtccaacgcctggcggatgactatgacgctgaactccaggccctgatcgaacactgctgcgccacgccggcggggcaggtcacgccttcggacttccccctggcgcgcctgacccagcagcaactggatgccttgcccatcgccgggccggcgatggctgatctctacccgttgtcgccgatgcagcagggtatgttgttccacaccctctatgagcccgaggccgaggcttacatcaaccagttgcgcctggatatcgacggcctggacctgctggcgttcggccgtgcctggcaagccgcgctggaccggcatgacatcctgcgcagcagcttccactggcttggcctggacagcgcgcatcaagtgatccagcgccgagtcgatgtgcagttgcacgtgatcgaagacatcgacgccgattgcgatgcgctcgccgctgccgagcgcgagaaaggtttcgcgctgaatgccgcgccgctgtttcgcctgatgctggtacgcggtgccggtaaggcctggcacctgatcttcaccagccaccacatccttatggacggctggagtaacgcccagttgctcggcgaggtcatcgctcattacgccgggcacagcgtgccggcgccgctggggcagttccgcgattacctgggctggctgcaccagcaagcgtcgggcgaggcgttctggaaggctgccctggcgccgctgcaagcgccaaccctgcttgcgcaggcgctgcgtgtgccggtcgaaggcaagggcatggctgaccatcaggtggtgctgggtgacgacttcacgcgtgccctgagtgagtttgcccgccgccataaagtcaccctcaacaccgtgctccaaggcgcatggagcgtgctgctgcaacgctataccgggcaggactgcgtggcctttggagccacggtggcggggcgctcggcaccgttgccggggatcgagcaacaactgggcctgtttatcaacacgctgcccatcatcagcgcggcctcgccagcgctgtcggtggctggctggctgagcgagctgcaagccctcaacctgagcctgcgcgaccacgaacatgtgccgctctacgacatccagggctgggcggggcagcagggcgctgcgctgtttgacaccttgctggtgttcgaaaacttcccggtggccgaagccttgaaacaaggcgcacccgccggcctgacgttcggccgcctgcataaccatgaacagacccactacccgctgaccctggggatcgaattgggcgccagcctgcgcctggagttcggctacgaccaggcccgtttcagcgctcaacaggtcgctcgattgggaggcaacctgcaccacctgctggtgcagatgctcgcagacgcgcaagcaccgctgggcaacctgcgcctgatggaccccgccacacgccgcgacgttctcgcccatagccgggcgaccggtgccgtcccgcgccaactgcgcgtgcatgaacgcatcgccgcccaggccgccgccacgcctgacgcgctggccgtgcaggcgggtgacgcacacctgagctacgcccagctcaatgctcgcgccaaccggcttgcccatcgcctgctggaactgggcgttggcccaggccagcgcgtcggcctggcggcacgacgtggcccgcagttgatcgtcagcctgctggcggtgctcaaaagcggcgccgcctatgtgccgctggacccgaactatccggccgaacgcctggcctacatgctgacagacagccggctcgacctgctgctcagcgaaaccgggctgctggccgacctgccgttgccccaagggctggcgcgtgagagtttcaccgcgtccggagaagaactggcaggctacccgtcgaccaatccaaccaaccatgccgccgctgccgacctggcctatgtgatctacacctcgggctccaccgggctgcccaagggtgtagccatcgaccatgccgccctcggccagttctgcgacagcgccgaggtctacagcggcttgagcgcggcagaccgggtgctgcaatttgccacgttcagcttcgacggctttgtcgagcaatgctacccgccgctgtgtgtgggcgcggcgctgatcatgcgtggcgacgaattgtgggacgcagggcaactggcgcggcacatcgtcgagcagggggtgaccctggcggacctgccggcggcctactggtatttgctggccaaggaatgtgccgtcgaccagcgcaccctgggcaacctgcgtcaggtgcatgtcggcggcgaggcgatgtcggtggaagggttgcgtgcgtggcacgccgccggcctgtgcgacgtgcgcctggtcaacacctacgggccgaccgaagcgactgtggtgtccagcgtgcacacttgccagttggcggacgccagtgatgcgtttggcgtgccgattggccgggccatcgacggtcgctccttgtatgtgctggacagtggtttcgaattgctcgccaccgagggtgtgggcgagttgtgcatcggcgccgaacacggtttggcccaacgttacttcgaccgcccggcgctgaccgccgagcgcttcctgccggacccgttttccgccgtgcccggcgcacggctttaccgcagtggcgacctggcgcgctataaccaggcgggtgcgttggagtatgtcgggcgcatcgatcatcaagtgaagatccgcgggttccgcgtggaaatgggtgagatcgaagccagcctgcaagctttgccgcagctgcgtgaagccgcggtcatcgcgcaatccagcgcgacgggcacgcagttggtggcgtacgtggttgccgccaacgggcagaccgtggacgctcaggcattggcggccaccttgcgccagtccctgccggattacatggtgccggggcactgggtcgtcctcgacgccttgccgttgaacaacaatggcaagcttgaccgtcgcgcactgccggcaccggacctgaaccaggcgcgccaagcctacctggcgccgcgaaccgcgctgcaaacgcgcttggccgccatctggcaagcggtgttgcaggtcgagcaagtggggctcaatgaccacttcttcgaacgtggcggccactcgttgctggcgacccaggtgatctcccgggtgcgccatgacctgcaactggaagtaccgctgagggcattgttcgaacaaccgacgctggaggcgttcgccgatgtttgcgcagggttgcaggcgaacactgcgctaccgctggtggcagtgacgcgcgaccagccgctggcactgtcgttcgcccaggaacgccaatggttcctctggcaactggacccgaccagcgcggcctaccatgtgccgagcgcgctgcacctgcgtggccgattggatgtcgcggcgctggaacaggcgttccaggccctggtgcaacgccatgagccgttgcgcaccacctttgtggaagagggcgagcacacttggcaacggattcacccgcaccttgcgctgccgatcgaacaccaacaggtcgaggcctgggcgatcgagcctgccgtggcgcaggagatccaacgcccgttcgacttggtcaatggcccgctgatgcgcgtcaaattgcttcaaatcgaggccgagcaccatgtactggtgatcacccagcaccacatcatctccgacggttggtcgatgcaggtgatggtcgatgagctggtggcgctgtatcagggccgggccgaactgccaacgcagctcatccagtacgccgactatgcccagtggcaacgtgattggatggcagccggtgagcaacaacgccaactcgactactggcgcctgcgcctgggcagcgagcatgccgtgctggaactacccctggaccacccacgcccggccgtgcaaagccatcgcggtgcacgccgccaggtgcacctggacagcgcgttggtcgccgggctcaaggccctggcccagcgtcaggacgtaaccttgttcgtgctgctgctggcgtcgttccagaccctgctgcatcgctacagtggtcaatcccagatccgggtcggcgtgcccattgccaaccgcaatcgcctggaaaccgagcgcctggtcggcttcttcgttaatacccaggtgctgcaggccgatgtgcacgggcagatggcgttcgaccaattgctcgtccaggtcaagcagcgcgccctcgaggcccaggcccatcaggacctgccgttcgagcaactggtgcaagccctgcaaccggagcgcagcctcagccataacccactgttccaggtgatgttcaatcaccaggaccgcctgcgcgccgcgccgctgcagttgcctggcctggacctgcaagcggtggattgggcagggcacagcactcagttcgacttgaatctcgagactgaggagtccgctgctggcctatgggcctctctgacctacgccaccgacctgttcgacgccgctaccctggatcgcctggccgagcattggcaaaacctgatgcacgcggtggtgcaggatgcgtcccaaaccattgatgaactgacgatgctcagcgtgccgcaatggcagcagatggtcgaaacgtggaacgacagcgctgtcgactacccccgcgaacgctgcgtgcaccaattgttcgaagcccaggccgtggcacagccgcaagcccttgcggtgcaattcaatggccaagccctgaactacggcgaactcaaccgccgcgccaaccgcctggcccatcgcctgatcgcggcgggtgtggggccggacgtattggtggcggtgcatgtcgagcgctccctggacatggtggtcggcctgctggcgacgctcaaggccggtggcgcttatgtgccattggacccgcaattcccggcggatcgcctggctttcatgctcgacgacagccgcgcacaggtcctgctgacccagccacacttgatcggtcacctggcgcacccgcagggtgtgcaggtattgatggtcgacgccgccgacgctgccgagcacaacccgcaggtcgaggtcacgccggaacacctggcctatgtgatctatacctctggttccaccggcaagcccaagggtgtgatggtacgccaccgggcgctgtgcagctttacctgcggcatggccgataccctggacatcggcattgacgcacggatgttgtcactgaccaccttctcgttcgacatcttcgccctggagctgtacgtcccgttgaccgtcggcgccaccgtattgctgagcggccaggaactggccctcgacccggaagcgatcatcgacctggtccacagccaatcggccaacgtgctgcaagccacgccgtcaacctggcgcatgctgctggaaagcccacgctcccagctgctgcacggtatcaagagcctgtgcggcggcgaagcgctgccggcggacctggcccagcgcatgctcgacctgcaaggcccgctgtggaacctttatggtcccaccgagaccaccatctggtcggcggcccatcgtctgcatgacgcacaaccatttgtcgggcggcctatcgccaacaccacgttgtttatcctcaatgccgggttgacaccgagcccggtgggcgctgccggtgaactgctgatcggcggtgtcggcctggcccgtggttaccacgagcgccccgcgctgacggccgagcgctttgtgcccaacccgtatggtgcgccaggagaacgcctgtaccgcactggcgacctggcccgctaccgtgccgatggcgtggtggaatacatcggccgcgtcgaccatcaggtcaaggtgcgtggcttccgcatcgaactcggtgaaatcgaagcctgcctgcgcgagcatgccggcgtgcgcgaggccgtggtcctggccgataacgaccgcttgatcgcttacctggtcagctcggtacccgacacggtagaagcctacaaggcggccctgcgcgagcgcctgccggactacatggtgccggcgcacctggtgttcctcgacagcctgcccctgacccccaacggcaagctcgaccgtaaggctttgcctgcggtggacgcggcacagttgagcaatggccatgtggcgccagtgacactgcgtgagcagcaggtcgcggcgatctgggccgaggtgctggagctgccgcaggtcggccttgacgatcacttcttcgagctcggcgggcattcgctgctggccacccgtgttgtctcgcgggttcgccaggtgctggcactggaagtggcactcaagaccctgttcgaacacccgcggttggaggatttcgttcaggcgctgggcgaggagggcgtggttgcacccgcgttgctcaaggctgaccgcaatcaaccgctgccgttgtcctatgcccaggagcgccaatggttcctctggcaactggacccgcaaagcacggcgtatcacatccccagcgcattacgtttgaaagggctgctcgacctgcctgctctgcaatgcagtttcgacaccttgctggcacgccatgaaagcctgcgcacccatgtgcgccaggacgctggcggcgcggtacaggtgattgaagactcgggcctgatcgagatcagcctgcttgacaccgaggaagatggcctgaaagcgcgggtcgcagaagtggttgcgcagccattcgacctgctgcgcgggccgctgttgcgggcccagttgctgcgcctggctgttgatgaccacgtactggtgctggtgcagcaccacatcgtctccgatggctggtcgatgcaattgatggtcgaggaactggtgcagttgtacgccaccttcaaccagggccggatgcccgacttgccagccttgccgatccagtacgccgattacgccctgtggcagcgcaactggatggaagccggtgagaaggcccgtcaactggcgtactggcaggctcagctgggtggcgtacagccggtgctggagctgcctttcgactacttgcgcccggcagtacaaagccagcgtggcgcgcgcctgggcattgagttgcaacctctgctgctgagcggtctgcgtcagttggcgcagagcgtcggagtcaccttgccgatggtactgctggcgtcctaccaggcgctgctgcaccgctacagcggccaggaagacgtgcgcgtcggcgtgccgattgccaaccgcaatcgcctggaaaccgaagggctgatcggcttcttcgtcaacacccaggtgctcaaggctgatatccatgggcagatgagtgtggtgcaactgttgcggcaggtgcgccagcgttccctggaagcacaggcccatcaggacctgccgttcgagcaactggtcgaagccttgcagcccgagcgcagcatgagcctgagcccgctgttccaagtgctgttcaaccatcgcgtgacctcggccgccaatcatttgcagcggctcgccgaactggatgtcgaggtgctgagctgggatgaaggtgtggcgcagttcgacctggcgctggatgtggaggaaagccaggcgacgctgcgtgcgtccctgagttatgccaccgacctgttcgccccggcgaccatcgaacgaatggccggccactggcagaacctgttgcaggcgatggtcgccgatcaacagcaacccatcagccaactgaacctgttgggcgaggacgagcgacagcacatcctgcaattgtggaacgagaccgacgcgggcttctcggccgagcgtctggttcaccaattggtggccgaccgcgcccgggaaaacccggatgcagtcgccgttaaattcgacgcgcaaaccctgacctacggtgaactggacagccaggccaaccgcctggcccatgcgctgatcgcccgtggcgtcggcccggaagtgcgcgtggcgattgccatgccgcgcagtgccgaaatcatggtggcgttcctggcggtgatgaaggccggtggcgtttatgtgccgctggacgtggaatacccgcgtgatcgcctgctgtacatgatgcaggacagccgtgcccagttgctgctgagccacagcagtgccttgcagcaactgccgattccagatggcctggacagcctggcgattgatcgcaccgaggagtgggtaggcttcagcgacactgaccctcaagtgaagctggacggtgacaacctggcctacgtgatctacacctccggctccaccggcctgcccaagggcgtggcggtatcccacggtccactggtagcccatatcatcgccaccggcgagcgttatgaaacctcgcccgccgattgcgaactgcacttcatgtcgttcgccttcgacggctcccatgaaggctggatgcacccgctgatcaacggcgccagtgtgttgatccgcgatgacaacttgtggctgccggaatacacctaccagcaaatgcaccgccacaacgtgaccatggcggtgttcccaccggtttatctgcaacagttggccgaacatgccgagcgtgacggcaacccgccgaaggttcgtgtgtactgcttcggtggtgatgccgtagcccaagccagctacgacctggcctggcgcgcactcaagccgacctatctgttcaacggctacggcccgacggaaacggtggtcacgccattgctgtggaaagcgcgcaagggcgacccatgcggcgcggtctacgccccgattggcacattgctgggcaatcgcaatggctacgtgctggactcgcaactcaacctgcaacccatcggcgtagccggcgagttgtacctgggcggcgagggtgtggcgcggggttacctggaacgcccggcactgactgccgaacgcttcgtgccggacccgttcggcaaacccggcagccgtgcctaccgcagcggcgacctgacccgtggccgcccggatggcgtggtggattacctggggcgtgtcgaccatcaggtgaagatccgaggtttccgtatcgagctgggcgaaatcgaagcacgcctgcgagagcaggacaacgtcggcgaaaccgtggtggtggcccaggacggtccgaccggcaagcagttggtggcttatgtagtgcccgcagacggcagcctgattaacgaaaccgagttgcgcgacaccctgcgtcgcgccctgaagacccgcctgccggactacatggtgccgacgcatttcatgttcctggcacagatgccgctgacccccaacggcaagctcgaccgcaagggcctgcccgagccggatgcgagcctgttgcagcaggcctatgtggctcccgaaaccgagcttgagcagcagatcgccgtgatctgggccgatgtgctgcgcctgccgcaagtgggcctgaacgacaacttcttcgaggtcggcggccattccctgttggcgatccagatcacctcgcgggtccaggccgagctgggcctggaagtgccgctggtggaagtgttccagaccgaaacgctgcgtgcctacgtgcaggccgccgccaccttccgcgccggcagcgcggaagattttgatgatcttcgtgactttttgagcgaactagaggcgatttgacccatgctttccaaccctaatatcgatctggtttcgcgctttcttcgcttgcctctggaacagcgccagcagttttacctgcgcctgcaaagccggggcatgagcttcgctcaattgccaatcgcgtcgatccgcgaggacggccagcacctgccgctgtcctacgcccaggaacgccagtggtttctctggcagttggacccggacagcgacgcctaccacgtccccggcgccctgcgtctgagcggccagctggacaaggctgccctgcaacgcagtttcgacacgctggtggcccgccacgcaagcctgcgcacgcgcctgcacctgaacggtgagcagcgtgcccaggaagtactggagcatggggtgatcgagatcgccgagcatgccgtcgacgaaacacagctcaaggcatgggtcgaggccgagatcgccggtccgttcgacctgcagcacggcccgttgctgcgggtcagcttgctcgccgtgagcgaagcggaacacgtgctggtgctggtgcagcaccatatcgtctccgatggctggtcgatgggcgtgatggtgcaggagttgatgcagctctatgccgcctacagccagggccaggactgcgcgttggcgccgttgccgatccagtacgccgactatgccctgtggcagcgcagttggatggaggcgggggagaaggcgcgccaactggaatattggcgtgaattgctcagcggcacgcaaccggtactggaattgccgttcgaccagccgcgccccgcgcaacagagcttccgcggggcgcgccaggacatcacgctggagccggcactggtcgccgggttgaaggcgctggcccagcgggaaggcgtgacgatgttcatgctgctgttggcctcgttccaggcatttttgttccgctacagcggccagccggatattcgtgtcggtgtgccgattgccaaccgcaaccgcgtcgagaccgaatcgctgattggctttttcgtcaacacccaggtgctcaaggccgacctcgatggccagataagctttgcccaattgctgcaacacaccaagcgccgcgcgctggaagcccaggcccatcaggacttgccctttgaacagttggtagaagcgctgcaaccggagcgcagcctgagccataacccgctgttccaggtgatgttcaaccatcaggcccattctccggccgtggcacagcagctaccggggctgcgcgtggccaacctggaatgggacagtcacagtgcccagttcgacctgagcctggacacccaggagagcggcgacgggatctgggcgtccctgacctacgccaccgacctgttcggcgccgccaccgtagcgcgtatggccgagcactggctgagcctgctgcgtgccgccgtggcagacaccgcgttgccgttgcaggacctggcgaccctcaacgcccaagagcgcgagcagatcctcgtcgagtggaacgccaccgagcgcgactacccgcaagggcagtgggtgcatcagttgatcgaagcccaggcgctggcgcagccggatgcgccggcgttgcgcttcaacgatatcgccctgagttatgccgaactcaaccgccgtgccaaccgcctggcgcatcgcctgatcgaagctggggtaggtccggacgtgctggtgggcctggcggtagaacgctccatcgacatggtggtgggcttgctcgcggtgctcaaggctggtggtgcctatgtgccgctggaccctgagtacccgcgtgagcgcctggcctacatgctggacgacagtggcgtgaaactgctgctgacccaggcgcatttgcgtgaacagttgccgattcctcaggggctggaaaccctggtgctgggcgagtctgtattcgagcactacagcgacgccaacccaggcatcacgctggacggcgaaaacctcgcctacgtgatctatacctcgggctccaccggtcaaccgaaaggggcgggcaaccgtcattcggcgttgctcaaccgcctgcaatggatgcaggaagcctatggcctggaggtcagcgatacggtgctgcaaaagacgccgttcagcttcgacgtatcggtgtgggagttcttctggcctttgatgaccggtgcgcgcctggtggtggcagcgccgggggatcatcgggatccggccaggctgatcaacctgatcaatcagcagcaggtcaccacgctgcactttgtgccgtcgatgctgcaggcgttccttcaggacccggcggtgtccacctgccaaagcctgcaacgcatcgtgtgcagcggcgaagccttgccggtggatgcccagcagcaagtcttcgccaagctgccgcaagccgggctctacaacctgtacggcccgaccgaggctgccatcgacgtgacccactggacctgcgtcgacgaaggccgtgacgccgtaccgattggccgtccgattgccaaccttggttgctacatcctcgacagcaatttcgaaccggtgccggtcggcgtgctcggcgagctgtacttgggcggcatcggcctggcccgtggttaccaccgtcgtccttccctgactgccgagcgttttatcgcgcatccgtttgtcaaaggcgaacgcctgtaccgtaccggagacctggcgcgttatcgcgcagacggcgtgatcgaatacgccgggcgcatcgaccaccaagtcaagctgcgcggtctgcgtatcgaactgggtgaaatcgaagcgcgcctgctggaacacgaatgggtccgcgaaaccgccgtgctggcggtggagggcaaatgcctggtgggctacctggtgctgcaaaacgccggcgatgactggcgcgatgtgctggccgcccacttgggccagcacctgccggactacatggtcccggcccaatgggtgctgctggaacagatgccgctgagccccaacggcaagctggaccgcaaggccctgcccaagcccgcatccacccagcactacgaagcgccgcagagtgcgctggagcagcagatcgcagcgatctgggccgaggtgctcggcgtcgagcaagtcggcttgaacgacaacttctttgagcgcggcggtgactcgatcatctccattcaagtggtcagccgtgcccgtgccgccggtatccacttcaccgccaaggcgctgttccagcaccagacggtgcgcagcctggcccgcgtggcgcaattacagaccgcgcaagtgatcgaccagggcccggtgcagggcgcgactccgttgctgccgttccagcaactgttcttcgagatggacttgccggaccgccatcactggaaccagtccttgctgctgacgccgcgccagccgctgcttgccgagccactggagacggcgttgcaggcactcacccagcaccacgatgtgctgcgcctgagcttcaccccacaggccgaaggctggaccgcacgccacgacgcgccagctgccaccctgctttggcaggccagcgtggaggatgcggccgaactgcatgccctgtgcgagcgcgcccagcgcagcctcgacctgcaacaaggccaactgctgcgtgcagtgctcgccgagatggccgacggttcccagcgcctgttgctagtcatgcatcatctggtagtggacggcgtgtcctggcgcgtgttcctcgaggacctgcaaagcctgtatcgccagcggcgcttgccggccaagacttcgtcgttcaaagcctgggccgagcgtttgcaggcccatgcccgcagcgaagcggtcgcgccggaaaaagccttctggcggcaacagctccagggcgtgtcgaccgacttgccctgccgcgatccgcagggcgcgcgtcccgggcgcctggcccagaccgtggtcagccaactggatgccgagcgcacccggcaactgctgcaacaggcgcccacggcctaccgcacccaaatcaacgacctgctgctgaccgccctggcacgtgtcatctgccagtggaccgggcaggcttcgagcctgatccaactggaaggccatggccgcgaagacctgttcgacgacatcgacctgactcgcaccctgggctggttcaccagcctgttcccggtgcgccttaccccggccgactccctggcgacctcgatcaagcagatcaaggaacaactgcgcgccgtgccggacaagggcctgggcttcggtgcgctgcgctacctgggcgacgacgccacgcgccaggtgttcggccagttgccggtgccgcgcattaccttcaactacctgggccagatcgatggcagctttgatcagccggacgctttgttcgtaccggcggcggagagcaccggtgccgagcagagcccggaggcaccgctgggtaactggttgacgttgaacggccaggtatacggcggcgagctgcacatgggctggaccttcagcccgctgatgttcgaccctgcgcagatcgaagccttgagccaggcgtttacccgtgaactgactgcattggtcgagcattgctgcgcgcctggcaaccacggcgtgaccgtctctgacttcccgttgtcgcgcctcacccagccgcagctggaatccctgccgctggccgccgatgccatcgaagacctctacaccctgtcgcccatgcagcagggcatgctgttccacaccctctacgagcaagcagccggcgactacatcaaccagatccgcgtgaccgccgagggcctggatgtggcgcggttccagcaggcctgggacgccacggtgcaagcccatgacgtgttgcgcagcggcttcttctgggaaggccagctggaatggccgtgccaggtggtgtaccgcgaagcccgactgccgattgaacacctcgactggcgcgccatgccagaacgcgaactggaattgcacaacctgcagcaagcccagcgccgccagggctttgacctggccaaggcgccgctggtgcgcctggtactggtacgcaccgacgagcaacgccatgagctgatctacacgaaccatcacatcctgatggacggctggagcaactcgcgcctgttcggcgaagtgctgcaacgctacgctggcgtggcggtgccgccagcggcggggcgctatcgcgactacatcggctggttgcagcagcgtgatgccgctgccaccgaaaccttctggcgcgaacagttgggcacgctgcaagcacccactcgcctgggcagcagccagccgctggcggcagacgggcacggcgagcacccactgagcctggatcgcgctcagactgaacgtctcgaggcctttgcacgccacaacaaagtgacgctcaacacgcttatccaggccgcatggctgatcctgttgcagcgccatagcgggcagtcggtggtggccttcggcgccacggtggccgggcgcccggcggagcttgtgggggtggagcagcagatcgggctgttcatcaacaccttgccagtgatcagcgccgtagatgaccagcagagcgtggcggcctggttgcaagcggtacaggaccgcaacctggccctgcgcgagcatgaacacaccgggctgtacgacattcagcgctgggccgggcagggcggtgaagccctgttcgacaatatcctggtgttcgagaactacccggtgtccaaggccctggaacaaaacggtggcagcggtatccgttttggcctgccggaatcccgcgaacagaccaacttcccgctgacggtgctggtggacgtcggcgatacgttgtcggtgcagttcagctttgcgcgtgcgcatttcgatgcaagcacggtacacacctatggacgtcacctggtcaatctgctgcacgccatgcttgagggtggccagcaacgtctgggcgacctggcgatgctcgatacggctgaacgtcagcaggtgcttcaggattggaacgccacggcgcgggactacccgttgcagcagggcgtgcatcagttgatcgaagaacaggtggcgcgcacgccgcatgccgcggcgctggtgtttgccgggcagcgcttgagctatatcgaactgaaccgtcgcgccaaccgcttggcccatcgcctgatggaagccggggtaggcccggacgtgctggtgggcctggccgtggagcgctccattgaaatggtggtgggcctgctggcggtgctcaaggccggtggcgcctatgtgccgctcgacccggaatacccgcgtgagcgcctggcctacatgctggacgacagtggcgtgaaactgctgctgactcaggcgcacttgcgtgaacagttgccgatccctcaggggctggaaaccctggtgctgggtgagtcgacctttgaagcctacagcgacgccaacccaggcatcgcgctggatggcgaaaacctcgcctacgtgatctacacctcgggttccaccggccaacccaaaggcgccggtaaccggcattcagccctggccaaccgtctgcactggatgcaggaagcctatgggctggaggtcagcgataccgtgctgcaaaagaccccgttcagcttcgacgtatcggtgtgggagttcttctggccgctgatgaccggcgcgcgcctggtggtggcagcgccgggcgatcaccgcgatccggccaggctgatcaacctgatcaatcaagagcaggtcaccacgctgcactttgtaccgtcgatgctgcaggcgttcctgcaagacccgaaggtcgcaacctgccacaccttgcatcgcattgtttgcagcggtgaagccttgccggtggatgcccagcagcaagtcttcgccaagctgccgcaagccgggctctacaacttgtacggcccgaccgaagccgccatcgacgtgacccattggacctgcgtcgatgaaggccgcgatgccgtgccgattggacgcccgattgccaacctcggatgctacctcctcgacagcaacttcgagccggtgccggtgggtgtgttgggcgagctgtacctcggtgggattggtctggcccgtggttaccaccgccgcccggcgctgaccgccgaacgttttgtcgcccatcccttcatcaagggcgagcgcctgtaccgcaccggtgacctggcccgctatcgccctgacggcgtgatcgaatacgccgggcgcatcgaccatcaggtcaaactgcgcggcctgcgcatcgagctgggtgaaatcgaagcgcgcctgctggaacacgattgggtccgtgaaaccgccgtactggcggtggacggcaagcacttggtgggctacctggtgttgcaagacgccggcgacgattggcgcgatgtgctgagcgctcacctggcgcaacagctgccggactacatggtgccggcccagtggatgctgctggagcagatgcccctgagccccaacggcaagctggaccgcaaagcgctgccgaaggtcgacgccaacctgcaagcccgcgaatacctggccccgcacagcgaactggaacaacagattgccgcgatctgggccgaggtgctggacgttgagcgtgtggggctaaacgacaacttcttcgaactgggcgggcattccctgctggccacccaggtggtggtgcgcctgcgcgagcaattgcacgcggagttcgacgtcaaatcgatcttcaccaccccgaccctggccgatttcagtgcctatgtggcggcccggcagacaaataattcgccggtgcaggacgcattggctaaatccttggaggccctcaaacgtctatcagcagaagatttggataaattgatttcctgaggggcgtggcgtgcaagcattaatcgagtcggtagggtcactttcggcgcaacagaagaaagcgttggcggtaatgctcaagcagcaaggcatcaacctgtttgagatagccccggttttcaagcgtcaggacggtgagcctcttcgactctcttatgcccaggagcggcaatggtttctgtggcaactggagccgcagagcaccgcttatcacgtgcccagggccctgcgcctgagcgggcccttggacgtggccgcattgcagcgcagctttgacacgctgatgatgcgtcatgaaagcctgcgcacgcatttgcaggaggacggcgacagtgccttgcaggtgattgccgagcaggcgcgggtgcagatcgccgtggtcgacgcccgggagtcgcagctcaaggacctggtggaagcgcaaattgcccagccgtttgacttgcagcaaggcccgctgttgcgagtcaagctgctgcgcctggcgcctgaggaacatgtgctggtgctggtccagcatcacatcgtgtctgatggctggtcgatgcaggtgatggtcgacgagctggtccagctctacgcggcccatgtgcagggccaggacctgcaattgccggccttgccgattcaatatgccgactatgcgctgtggcaacgcagctggatggaggcgggggagcgtgaacgccaactgggctactggaccggcatgctcggtggcgagcaaccggtactggaaatgccgatggaccgaccgcgaccggcggtgcagagctaccggggtgcacggctcgacctgacgctcgaagcgtcgctggtggcgggcctcaagcgcctggcgcagcgcgaaggcgtgacggtgttcatgttgttgctggcgtcgttccaggccgtgttgcatcgctacagcggccagggtgatatccgcatcggcgtgccggtggccaaccgtaaccgggtggaaaccgagcgcctgatcggctttttcgtcaatacgcagattctcaaggccgatatcgacggccagatgaccttccatgaactgctgcaacaaacccgccagcgctcggtagaagcccaggcgcatcaagacttgccctttgagcaactggtggaagcgctgcagccggaacgcagcctgagctacaacccgttgttccaggtgatgttcaaccaccagaccgatacccagcgcagcggcggcagcgtcaccggcctgcacgtgcaggggctggaatgggagagcaagaccgcgcagttcgacctcaacctcgacacccaggaatcggctgagggcatccaggcgtcgttgacctacgccactgacctgtttgacgcgccgggccttgagcgcttgctcgcgcactggcaccgtttgttgcaacaggtggtgcaggattgcaacgtccgcgtcggcgagctgccgttgctggacgatgcgcaatggcagcaactggtgcacacctggaacaacacgcatcaggtgttcccccaggatgtcggggtgcaccgcctgctggaagcccaggcacaggcccgtccggacgcgacagcgctggtctgcaacggccagtctttgagctacgcagaactgaacctgcgcgccaaccgcctggcccatcgcctgcgcgcggccggtgtcggcccggatgtgctggtggccgtggcgctggagcgttcggtggacatggtgctggccttgctggccacgctcaaggcgggcggcgcctatgtgccgctcgacccgcagtttccggccgaccgcctggcgttcatgctcgaagacagccgcgcacgtgtgctgttgaccgccggtgacctgcacgagcgcctgccgctggcagccgatcaacaggtgctgttcatcagtgaacaggaggacgcccgttacagcagtgacaacccgcaggtcgcgctgaccgatgagcacctggcgtatgtgatctacacctccggctccaccggcaagcccaagggtgtgatggtgcgccatggcgccctgagcagctttacccagggcatggccgacacgttgagcatcgacgccaaggcgcggttgctgtcgttgaccaccttctccttcgatattttcgcccttgaactttatgtccccctggcggtgggcggcacggtcgtggtggcggacaagcctgtttcccaggaccccgaagccatcctgagcctgctgcatgaacaggcgatcacggtcgtgcaagccacgccctcgacctggcgcatgctgctcgacagcgagcgccgtgccgtgctgcacgggatcaagtgcctgtgcggcggcgaagcgctgccggccgacctggccgagcgcatgctggcccagcagggcacggtgtggaacctgtacggcccgacggaaaccaccatctggtcggcggcccacccattggttgaaccgttgccgtttgtcggtcgcccaattgccaacacatcgctgtttatcctcaatgccgaactcgctccgacaccggtcggcgtcagcggcgaactgctgatcggcggtgtcggcctggcccggggttatcacggtcgtgctgcgctgaccgccgagcgcttcgtacccaacccctttgcacacaacggtgagcggctgtaccgcaccggcgacctggcgcgttatcgcgtggatggtgtggtcgagtacatcggccgcgtcgaccatcaggtcaaggtgcgcgggttccgtatcgagttgggggaaattgaggcgtgcctgcgtgagcagagcgctgtccgtgaagcggtggtggtggccgagaatgaccagctcctggcgtatctggtgacgcacgccgtgacatcggaaaccgatcagggcaccctgcgcgagacgttcaagaccgcgctgcgcgcggtgttgccggactatatggtgccggcgcatatgctgttcctggcgcgcctgccgttgacgcccaacggcaagctggaccgcaaggcgctgccgaagccggacgccagcctgctgcaaaaacgctatgtggcaccggtcggcgagaaggcgcaacaagtggccgcgatctgggccgaagtgttgggggtgccacaggttggccttgaagatcatttcttcgagctgggcggtcactccttgctggcgacacgtgtcgtgtcgcgggtacgccaggcattggcgatcgacgtagcgctcaagagcctgtttgaacaaccggttttgggggcgtttgtacaggcgctgggtgaaaagggcgccgatgttgcgcacattagcttggctgaccgcgaacaacccttgctgctttcctatgctcaagagcgccagtggttcctctggcagcttgaaccggacagtgcggcttatcacattccggccgcgttgcgcctggtgggtgcgctggatcgcaacgccctgcaaagggccttcgatactctggtgcagcgccatgaaacgctgcgtacggtgttttttgccgatacgcaccagactgtccagcgtgtgatcgagcaagtcgcgccggtcatcgactatcaagtgcttggctcgactgagccggcccggttgcaggcgatggtagaagacgaaatcgccaggccattcgacctgcagtccgggccattgctgcgcatcaagctgctgcaactgagcgaacgcgagcatgtgttggtcatggtgcagcaccatatcgtctcggatgcctggtcgatgcaagtgatggtcgatgagctggtgagcttgtatgcaggctacagccagggccttgagcccacccttgcaccgttgccgattcagtacgccgactatgcccagtggcagcgcagctggatggaggcgggtgaaaaggagcgccagctggcctactggcgtgcgcgcctgggagatgtgcaaccggtgctggagttgccgctggatcggccgcgtccggccatgcagaactatcagggggcacgcctggacctggtgctggagtcgtcggtggtcgagggcttgcgcgcccttgcacagcgcgaaggcgtgacgatgttcatgctgttgctagcgtccttccaggcactgttgtaccgctacaccggccagtcggacatccgcgttggcgtgccgatcgccaaccgcaaccgtctggaaaccgagcagttgatcggctttttcgtcaatacccaggtgctcaaggccgagattgacgggcacatgacctttgcccaactgctgcaacaggtcaaggaacaggcgctgggcgcgcaggcccaccaggacctgccattcgagcagttggtcgaagccttgcaacctgagcgcagcctgagccacaacccgttgttccaggtaatgttcaaccaccagtcggctgcgcaagcccatcgcgatggccagcaactacctggcctgcgtgtggaagggttgacgtgggacagtcacacggcgcatttcggcctgagcctggacaccgaagagtctggtgaggggctgctggcttcgctgacttacgccaccgcactgttcgacgcgagcaccctgcagcgcttcgccgcccattggcagaacttgctcaagcgtgtggcgggcaatgcccagcagtgtgtcgccgacttgccgatcctgggcagagatgaacaagcgcagatgctgtacgcgtggaacccgccgcaaccgtcgcgtgccgcccatggcagcgtgctgcaaaagttcgaacaacaggtggccagccagccccaggctatcgccttgatcatggatcagcggcgcatgacctacgccgacctcaacctgcgggccaaccgcttggcccatgcactgatcgagcagggcgtgggcgccgacagcctggtcggcgtggccgtggaccgttcgctggagatgatcgttgcgctgttggcggtgctcaaggccggtggcgcctatgtcccgctggacccgcaatacccccaggaccgcctgcaatgcatgatcgaagacagcggcctgcaactgttgctgacccagcagccgctgctggagcgcttgccgatcagccctggcctgacgttgatttgcctggaagagggtgcggactggctggccgagtacccgggcagcaatcctgagatacgggcgttccccgcgaacctggcgtacctgatgttcacctccggctccaccgggcggcccaagggcgtcggtatcgatcaggcctcactggcacggcatgtcgaggtgtttatcgagctgttcgaactgactgcggctgaccgtgtgttgcagttcggtacgttcaacttcgacgggtttgtcgaacagctgtatccggcgctgtgctgcggtgccgccgtggtggtgcgcggcggtgagttgtgggacagcgacaccttctatgcgcaactgatcgaacatgacatttcggtggttgacctgaccaccgcctattggcacctgatcgctcgtgactttgccgagcgcggtgtgcgcgattacggccgcctgcgccaggtgcatgccggtggtgaggcgatgccaccggaagggctggcctcctggcgtgatgccgggctgggccacgtgcgcctgctcaacacctacggccccaccgaagcgaccgtcacggtgaccgctctggattgcgccggttacgtggagggtcgcgagaccgttacgcagatgatgccgattggtcgcgtgctggacggccgtgcgatttacctgttggatgccggcctgaacccggtgcccgtgggcgtggcgggtgaattggtgatcggcgggccgctgctggcacggggttacttcaaccgcgccgcgctgaccgccgaacggtttatccccgaccccttcgacccgctcgggggagggcgtctgtaccgtaccggcgacctggcccgttaccgcgccgatggcgtgatcgagtatatcggtcgcatcgaccaccaggtcaaggtacgtggcttccgtatcgagctgggcgagatcgaatcgcgcctgctggcacaggacgacgtgcgcgaagcgttggtgatcgctgccgaccagcaactgatcgcctacctcgtcaccccattgacggaagccgagcagcctggcttgcgtgagcgtattcgtggcgtgttgcgcgatgagctaccggactacatggtgccggcacatttcatgtttctggagcgcctgccgctgagccccaacggcaagctggaccggcatgccctgccgcgcccggaagcgactcaggcgactgagcagtgggtggcccccatcagtgcgctggagcagcaggtcgcggcgatctgggcagatattctcggcgccgagcgtatcggtttgaacgaccatttctttgaactcggcgggcattcgttgctggccatgcaagtggcttcacgcctgcggcataacctggggatcgagttacccttgcgtgtgctgttcgaacaaccgcgcctgcaggggtttgtggccgcgctgcacaccgagggcaagcgcggcggttcgacggcgccggcgttggttcccgcgtctcgcgagctgccgttggtgttgtcctacgcccaggaacgccagtggttcctctggttgctcgaccccgagagcactgcctaccacgtgcccagcgctttgcgcctcaagggccgtttggacctgaacgcgctgcagcgcagtttcgatgcgttggtggcgcgccatgaaagcctgcgtacccatctgcatcagggcgatgagcagaccgtgcaggtgatcctgccgcaggcgcgtgtcgagattgcattgcgtcagagcgatgaagcgcaggtcaaggcgcaggtcgaagccgagatcgcccggccgttcgacctgcaagcggggccgttgctgcgggctacgctgttgcgcctgagcgacgacgagcatgtgttggtgctggtccagcaccatatcgtctcggacggttggtcgatgcagatcatggtcgatgaactggtgcaactgtacagcgcctacagtcagggcctggaggtgcagttgccggccttgccgatccagtacgctgattacgcccgttggcagcgcgagtggatggacgccggcgagaaggaccggcaactgggctactggcaggcgttgctcggtggcgagcaaccggtgctcgaactgccgttcgaccaccagcgcccggctgagcaaagccatcgcggtgcgcgcctgtttgtagaattgccgccggccttggtcgccgacctcaaaggcctggcacagcgcgaaggcgtgacgatgttcatgctgttgctggcctcgttccaggcgttgatgcatcgctacagcggccaggaagacgtgcgcgtgggcgtgcctattgccaaccgcaaccgagttgaaaccgagcggttgctgggctttttcgtcaatacccaggtgctcaaggccgatatcgacgagcagacctcagtgctgcaactgttgcagcaggcccgccgccgtgcgctggaagcccaggaccatcaggatctgccgttcgagcaactggtggaggcactgcaacccgagcgcagcctgagcctcaacccgctgttccaggtgatgttcaaccatcaaaccgaagcacgtctgggcgcaaccgagcatcaactgtccaccttgcgtgtcgaaggcatggaatgggcaagccagaccgcgcacttcgacctggacctggacgtgcatgaaggcactgacggtatctgggccaccctgggttatgccaccgatctgttcaatgcctccaccatcgagcgcatggcgcggcattggcagaacctgctgcaagcgatggttgccgaccaacagcaacccatcagccaactgaacctgttgggcgaggacgagcgacggcacatcctgcagctgtggaaccagaccgatgccggcttctcggccgagcgcctggtgcacgagcgagtggccgaccgggcccgcgaaacccccgatgccgtggcagtgaagttcgacgcacagaccctgacctacggcgaactggacagccaggccaaccgcctggcccatgcgctgatcgcccgtggcgtcggcccggaagtgcgcgtggcgattgccatgccgcgcagtgccgaaatcatggtggcgttccttgctgtgatgaaagccggtggcgtctacgtgccgctggatatcgaatacccgcgagatcgcctgctgtacatgatgcaggacagccgtgcccagttgctgctgacccacaccagcgcgttgcaacaactgcctattcccgagggtctggacagcctggcgattgatcgcaccgaggaatggtccggttacagcgacacggcgcctgatgtgaaactggacggcgacaacctggcctacgtgatctacacctccggctccaccggcctgcccaagggcgtggcggtatcccacggtccgctggtggctcacatcatcgccaccggcgagcgttatgaaacctcgcccgccgattgcgaactacacttcatgtcgtttgccttcgacggctcccatgaaggctggatgcacccgttgatcaacggtgccagcgtgctgatccgcgatgacagcctgtggctgccggaatacacctaccagcaaatgcatcgccacaacgtgaccatggcggtgttcccgccggtttatctgcagcagttggccgagcatgccgagcgtgacggcaacccgccgaaggtgcgcgtgtactgcttcggtggcgatgccgtagcccaagccagctacgacctggcctggcgcgcactcaagccgacctatctgttcaacggctacggcccgacggaaacggtggtcacgccactgctgtggaaagcgcgcaagggcgacccatgcggcgcggtctacgccccgattggcacattgctgggcaatcgcaatggctacgtgctggactcgcaactcaacctgcaacctatcggcgtggctggcgagttgtacctgggcggcgaaggcgtggcccgtgggtatctggaacgtccggcactgaccgccgaacgcttcgtgccggacccgtttggcaaacctggcagccgtgcctaccgcagcggcgacctgacccgtggccgcccggatggcgtggtggattacctggggcgcgtcgaccatcaggtgaagatccgaggcttccgtatcgagctgggcgaaatcgaagcgcgtctgcgcgaacaggacaacgtcggtgaaaccgtcgtagtcgcccaggacggcccggccggcaagcagttggtagcttatgtggtgcccgcagatgccagcctggccaacgaagccgagttgcgcgaaaccttgcgccgcgccttgaaaacccgtctaccggactacatggtgccggcgtacttcatgttcctggcgcaaatgccgctgacccctaacggcaagctggaccgcaagggcctgccgcagccggacgccagcctgttgcaacaggcctacgtggcaccgcagagcgagttggaacaacaactcgcggcgatctgggccgacgtgctgcgcttgccgcaagtgggcctgaacgataacttcttcgagctgggcggtgattcaatcatctcaatccaggtggtgagccgtgcgcggcaggccggaatccgctttacgcccaaggacctgttccagcaccagaccgtacaaagcctggccggtgtggcacgccagggggacgacgggttgacgattgatcaggcggccttgagtggcgaaacgttgctgctgccgatccagcaggctttctttgccgatgagattgccgagcgtcaccactggaatcagtcggtggtgctcaaagcccatgagccccttgacgctggcctgcttacccaggccttgcaggcgctgatcgtgcatcacgatgcgctgcgttcccggtttgtcgagggcacggacggctggcagggtatgtatcgcgccgccgagcaccaccaggccgatgccgtgctgtggcaaagcgtgctgcacgatatcgaagagctggctgttttgggtgaggaggcgcaacgcagcctcgacctcgaccagggcccgttgatgcgtgcggtgctggttcaattgcacgatggtacgcaacgcttgctgctggttatccaccacctggtggtggatggcgtgtcatggcggatcctccttgaggacctgcaaacggcctatcgccaactcgccagtggcgccaaggtggcgttgcccgccaagaccagttcgacccgcgactgggcgcagcggcttcagcgatatgccaaaggcgacgcactgacccgggaactggcatggtggcaagcccaattgcacggcgccgaatctgacctgccgggcgccaatccgcaggcgagcttgagcaaccggcatgccggcagtgcgatcacgcacctggacgccgctcacacgcgccgcctgttgcaggatgcacctgccgcctaccgcacccagatcaacgacctgctgctgacggcgctggcgcgggtaatcgggcgctggaccggccacgattccaccctgatccgcctcgaaggccatggccgcgaagacctgttcgaggagatcgacctgacccgcacggtcggctggttcaccagcatttacccggtcaaactcacgccggctgcaaccctggctggctcattgaaggggatcaaggaacaactgcgcgccattcccgacaagggcatcggttttggtgccttgcgctacctgggccagcccgaggtacgcgatgcattggcagacttgccgcagccgcgcattaccttcaactacctgggccagttcgatgcgagttttgatagccctgaacacgaggggctgtttgcgccgtccggtgacgctgccggcaacgatcagagcccggacgcatcgctgggcaactggttggaaatcaatggccaggtgtacggcggcgagctgaacctgaactggggattcagccagcagatgttcgatcccgcttgcatccagcagttggccgatgactacgccgaagagctcaaggcgttgatcaagcactgctgccagcccggacaggccggcgccacgccgtcggacttcccgctggcgcgcttgaaccaggcgcagttggatggcttggggttgccgttgaaccaggtcgaagacctttacccgctgtcgccgatgcaacagggcatgctgttccaatcgctgtttggccagggctcgggcgactacatcaaccaaatgcgcgttgaggtgcaaggattggatgtggcgcgtttccgcgcagcctggcaggtcgcgctggagcaccacgatatcttgcggaccggtttcctctggcagaccgagttggagcagccgttgcaagtggtgtaccggacggcgcaggtgccgtttgtcgagcacgattggcagcagcgcgcagacagtggcgaggcgtttgacgcgttggcgcataccctgcgagccgatggttttgtgctggaacaggcgcccttgctgaacctgatggtggtccgtaccggtcccgacagccaccatttgatctacaccaaccaccatatcctgatggatggctggagtgcctcgcagctgttcggcgaggtgctgcaacagtatgccggcgagtcggtgcgcgcacccagtgggcgctaccgggattacatcggttggttgcaggcccaggacccgttcaccagcgagaccttctggaaagcccagttggccggtttgcaggagcccacgcgcctttcccgtggcatcacccatgagtcgggtgtgccccaggccaatggcgttcatcacctgacgctggagcagacggcgaccgaacagctcaaggctttcgcccagcgccacaaggtgaccctcaatacgctggtgcaaagcgcctggctcttgctgttgcaacggcataccggccttgacacggtcgcgttcggcgccacggtcgcggggcgtccggccgagttggcgggtatcgagcagcaggtcgggttgttcatcaacacgctaccggtggtggccactccaagcccgcagttgagcgtcgacgcttggttgcagcaagtgcaggaacaaaacctgcgcctgcgtgaacaggagcacacgccgctgttcgagatccagcgttgggccgggcttggtggcgaggcgttgttcgacagcatcctggtgttcgagaactacccggtgtccgaagcgctggagcagggctcgccggcgggcctgcggttcggtgcgatggacagcctggaacagacccactatccactgaccgtgctgctgggcatcggtgacagcctggcggtggagttcaactacgctcacgccgccttcgacgcacaggacatcgtgcacctggcggaacatttccagcaattgctgcaagccttgacgctgccgcaggtggagcgcctggcggacttgccgtcgctgcccgccgcacagcgtcaacggatcgttgaggactggaacgcaacggcgcgtgagtacccgttgcagcgcggcgtgcatcagttgatcgaagagcaggtagccctgacaccagaagcaccggctttggtgtttggtgcacagcgcctgagctacgccgaactgaaccgtcgggccaaccgcttggcgcatcgcctgatcgaagctggggtaggtccggacgtgctggtgggcctggcggtcgagcgctccattgaaatggtggtcggcctgctcgcggtgctcaaggccggtggtgcctatgtgccgctggaccctgagtacccgcgtgaacgcctggcctacatgctggacgacagtggcgtgaaactgctgctgacccaggcgcatttgcgtgaacagttgccgattcctcaggggctggaaaccctggtgctgggcgagtctgtattcgagcactacagcgacgccaacccaggcatcacgctggacggcgaaaacctcgcctacgtgatctatacctcgggctccaccggccaacccaaaggcgccggtaaccggcattcagccctggccaaccgtctgcactggatgcaggaagcctatgggctggatgtcagcgacacggtgctgcaaaagactccattcagcttcgacgtatcggtgtgggaattcttctggccgctgatgaccggcgcgcgcctggtggtggcagcgccgggggatcatcgggatccggccaggctgatcaacctgatcaatcagcagcaggtcaccacgctgcactttgtgccgtcgatgctgcaggcgttccttcaggacccggcggtgtccacctgccaaagcctgcaacgcatcgtgtgcagcggcgaggcattgccggtggatgcccagcagcaagtcttcgccaagctaccgcaagccgggctctacaacctgtacggcccaactgaagcggccatcgacgtgacccactggacctgcgtcgatgaaggccgtgacgcggtaccgatcggcaaacccattgccaacctgggctgctacatcctcgacagcaacttcgaaccggtgccggtgggtgtgttgggcgagttgtacctcggagggatcggtctggcgcgtggttaccaccgccgtccggcactcaccgccgaacggtttgtcgcccatcccttcatcaagggggagcgcctgtaccgcaccggtgacctggcgcgctaccgcgaagacggcgtgatcgaatacgccgggcgcatcgaccatcaggtcaaactgcgcggcctgcgcatcgagctgggtgaaatcgaagcgcggctgctggagcatgcagcggtgcgtgaagcggcggtattggcggtagacggccaatacctggttggctacctggtcttgcaggagcaggatgcgcagtggcgtgaaaccctcagtgcccacctggccagccatttgccggactacatggtgccggcacaatggctgttgttggagcagatgcccctgagccccaacggtaagctggaccgcaaggcattgcctaagccggacactcagtcgacccagcgttttgaggcaccgcagaatgagctcgaacagaaaatcgccgcgatctggaccgatgtacttggcgtagagcaagttggggtgaacgacaacttcttcgagttgggtggtcattcgctgttggtattgatgctcaaggagcggattcgcaaggccagcagcatcgacctttctgtcagccagttgatgctcaacccgaccgtgcgtgcgcaagtcggttgcctgcaagggacggcacgtcgttcgctgctggtcccgctcaacggtcagaacacgggcacgcctgtctacctgttccaccccagctatggttcggtgcattgctacaaggctttggccctggcgttgcgtgagcagcggcctgtggtcggtgtgatttgtcgcgcattggccgaggagggtgcgcaagtgccgacctgggccagcatggtcgaggattacatcacgcagttactggaagctcagcccgaaggcgccttccgcctggccggctggtcgctgggcggcaacctcgcggtagaggttgcgcatggcctggagcaggcgggccggaacgtggagttcgtgggttggatcgactcggcccccccgcgttggctcactcagtattgggatgcggccgtcatcaccgatgagcgcgagatctccgataatgatcggcgcgtggccttgctcggtgtgatgttccctgcgtttgcagaggcgatccatcgcacctggcaggctttgcaagtggccgacgacacggcggatcagcaatgggcagggttcatcgaatgggctgaaaccaccttgggtgaagctttccgcgacattcagcaaacgctgttgggtggcaacgaggcacaggtttcctgggaggttgaccgcaccttgttcaagcgtatggagcaggctgacttcaagccactcaaggcgccggtgagttgctggtgggcggccatgagccgtgcgggccagcacaaggcgttgatcgaagacagtatggctcgggtgctcggccaggcggtggtgcggtcggtggagatcgatgtggaccacgaacggatcatcgacaatgccgagttcatacgcagctttgtgatggccatggagtaaccgtcgcttaaaccacaagccccggctcatgggtgtgagccggggcttttttgtggggcaaaggtgtgcacggcagaggcaccgtaccgcccataaaaaaacaccctgcgcaggtgttgcctgctcagggtgtcggggggtgccggtgtagggtcagaagtcccagcgggtcgaaaacatcacgttgcgtgggtcgccggcgtaggacgaggtgtagaacccgatgttggtgtagtagcgcttgtcgaacacgttattgacgttcaccgaggccgagaggtttttggtgatctggtagcgcgccattgcgtcaaccagccagtacgggtcttgggagaagcgctgggtcactctcttgccgcggttgtagacgtcctgccaggcctcgccctgccagcgggcgccgccgccgagggtcagtttgtcgagcgcgcccgtcagcttgtagctggtgtagaagttcagctggtcctgaggttcccaggtggagaacttcttgccgtcgtcatcgcggatcactttgtgggtgtagcccgcctgcacttgccagcccggcagcagttcacctgagatctcggcttcatagcccttggttgtggcctggacgcccttgtaggcccactcgacaggcgagttggccggcatattgttgttgtactcagtgtcttcctcggcacgattggactcatggatctcgaagtaggccaggctggcgttcaagcggccgtcgtagaactcacctttcaggccaatctcgtagttctcgccttcgtctggctcgaccatcttgttgttgcggtcgggccgcagttgttgcggcatgaagatcgaggtatagctgccgtacaccgagaaatttttgttcaggtcatacaccacacccgcatacgggatgagcttgccggtttcgcgcgaatcgttggtgccggtcaggcggtagtcggtcaggcgtgagccgagcaatacggacagatcatcggtgatgctcaggcgggtcgagaagtagacggcggcctggcgggtgatgtcgtctttttcgtgggcagggccccattgtggttcaaggctgtcaccgttccattcatagagcgggaaattgttgctgtctcgataggtcgcttcatagccgtaatagtcgttgccttcccagtgtgaacgcgacaccgaggacccgacgaccaactgatgttcgcgcccagccaggctgaacggcccggagaggtagaagtcaccgttgttgctgatggtcttgccggtgaacttggaaccatagactgcagttctgtcggtagtgcccgagatcggcgacgcataacccaatggcgcgttgtacccattgagctggttgctgtagttggccttggcgatccagccattatccagggcgtgttccagggtggcgaatacactgcggctgtattgcccccagctgctccacttcggcccgttgttgtagccacggtcgaacttgatttcattgcctacaccatcgaaaagcgagcggctgcccgaccagctcgatcctttgggatcgttgttctggtaatcggcgccaacggtcagcagggtgtccggggaaaggtcgaattcgaggatgccgtagtagacattggtcttgcgttcgtagtggtcaatgaacgaatgcttgtcctggtacgccacaacggcgcgcccgcggacattgccgctatcggtcagcgggccgctcacgtccagttcagagcggtagttgtcccatgaacccgcgcccaggcctacgtggccctggaattcggcggtcggcttcttgcgcaccaggttgatggtgccgccagggccgccggcgccggtcatcaggccggtggtgcccttgaggatttcgacgcgatcgtagatagccatgtcgctgagggtctggccagccgagtaaccctcattgcgcgtagtgggtacgccgtcatactggaaattctggatcgggaagccgcgggaatagtagttggttcgttcgctgtcgaaggtcgagacagtgatgcctggcgtgtggcgcatcacgtcgtcaataccgttcaggccgaagtcgtccatggtctggcgggtgacgacggaaatcgactgcggtgtctcacgcggcgtcagcaccatcttcgtagcggtcgcgatggtacctggcgtgtaggaaccggtgccttcggtaatggtgcccaactggttggcattgatctgggtcgcgcccagctccaaggcgccggtgccggaggcgggtgcgttgatgatcatcgagctgccctgcaggctgtagctcacgccagtaccggccagcaggcgttcgatggcctgcaccggatccatcttgccgctgacggcgctgctgtgtttgtctttgacggtgtccgggctatacaggagctgcaggttggtttgttgaccgaatacctgcaacgctgtactcaaaggttgcgccgggatgttcaattcgaactcttgcgcctgaacatagcccgccactggcaggctgaccgcaagggccagggcactggggagaacgtttaatttcaaagcccgtcgcatggagactgcggtgctcaacgggctgagggcaagccgtactggcatggattgtttctctttttagatgttagcagataggtacttaatgcggttaattctcattgctgcatatgagacgttcgcactcgcataaaccggaaaaatttatgcgggctccagttctgcaacgacttttccggcactcaaacgcaccaactggtcggcaatatcgaaatagcggtcgtcatgactgatcacgatgatcgtcttgcccaggcgcttgaggtccggcagcagttccgtgtagaagatgcggcggaaggccgggtcctggtcggcggcccattcgtcgaataccagtaccgggcgctcttccagccaggcgttgaccagggccaggcgcttgcgctgcccggtggagaggtcggtggtgctgaacacgccgtccttgacgctgaccttgtgcgcgatttccaggcgttccaggtacttggcggcgctgtccagcgactgcgtggcactgccctgtaccaggtcatcgaataggtagtagtcggcgaataccgtggtgaatagctgacggtagtcgtcgcgcgccgggtcggtcacggtttcgccgttgaggcggatttccccggcgtggggttgatacaaaccgagcaacagcttgatcagggtggtcttgccgcagccgttctcgccgacaatgaacacgatatcgccctgctggatgctcaggttgatcggccccaggtggaacggctggctgccttccaccggcggcgggctgtaggtcacgccgcgcaattccaggctgttgaccaccggcgtgggggcttcgctgccatccatgagcaagtgcggctcgggtgacgagaagcggtcggacagctcggtgatgcgcgcaaaggcaatccgcgccttgccgatgatcggcaagtagccaaccacatgctccagcgggcctttcatgtacagcagcaccagcacgaagccggtgatcactgcggggtccgggttcgggttataggcctgcatcgccagggccaggccgatgaccacgaagaacagcatcgagccgaaggtcttggcgacgatatagatgttcaccgaacgcacctggatatcgctgatgcggtcggcggtttcctggatgcggtgggtgttcatgcggtagcgacgtgggcgatggatgcgcagctccttggcaccggaagaaatcgcggagtagtagcgttgcaattcgtcttcctggtcgcgggcttcgtcgaagccacggatgcccttgtgcccggcgatgaattgcacgctgctgccaatcacgatggcaacgatcatcatcaggaacatcggcaccgacaggtacgccaggtagccaaggcaacccagggtcacggtagtcgcgatggccagcggcgtgaacgcaaaggaaaaatcactgatggtgtcgacgtcatgggtcagcaccgggatcaggcggtgagagcgaaattgctcgatctgctcgatgggcgccgaaagcaccttctcacccagttccttgcgcagtgccgcaatgatgcgttggcccacatagttggtgccgatatcggagacgatcgagctggtgagtgccagcacacacaacgccgcaaacgtcagaatcaccccctgcgtcatcccggtggacgagtgcaaggcgttgttgatggtcgccagcaacagcgtgatggccaggccgccggccatgcccagggcgacggagacggtcacgatggtgcgaaagggcctgagcaatgcgagcaaacctttgaaggcgccgcgcttggggtcggtcataaatacttcccggaaagtgaaaaaagagggggctgggcacacagacccttacccatgacaaacgaaggattggcgtgactatttagcgcggcgtgcccggcggtggcggggatggataaattaggcggggcctggttcgttcttgtggagtagccgcacgcgttttggcgcgtgcctgatttatccagcgagagcgaaacaatgacgaaaaggaatctggtgtacgtgtggtcactgcgcaatgccgccgccgacaaggcaggacagccagtggcctacaaggaccacgagcgctacatgatgtcggtgctggaatccctggcaggggccctgaacgacacgccgctgggcgaggcttataacttggtgggcgtggtatatgacgatgacgagcagaacccgcgcgaccagcaactggtccgcgactacggcttcgcctaccagccgggccgccaatggctgtacccggccgacctgcgcgtgcaggggcgcctggtcaatgacttgctgctgagcgtgccgtccacctatcggcgcctgccacggggcagcgcggaacacatcgccggcaagcaggacttcgaacgtcgcctgcacgacacgctggtggaattgaaggcggacatcgtggtgctcgacggcctgctggtgatcctcgatgagctggtgcgccctggtgcgccgtttgccggccgcatcatgaacatccaccccggtattacccgcatcgaatcgccgtacgagcgccgtggcgcctatgccacctggaacgcgctgtacggtgcgcgggggctgacggtcacggattgggcgaccaaggccaccacgccatccgagccgctgtacctcaccggtgcctcgtttcactacgtggacaacggcattgattccggtgaagtgttccacgacgtgctcaagaccgagatcgcgccggacgacaccatccttgagttgcgctggaacaacttcaacaacagcctgttcccggcgttgcatgaagggttggcgttgttggcccagaaggcaatctaaagcagccacggttaaaaatgtgggagggggcttgcccccgatggcgggagtgactgatacaccgccatcggggg

SEQ ID NO: 37 - DNA, 36594 bp, Pseudomonas nodulensis
ttgcccccgatggcgggagtgactgatacaccgccatcgggggcaagccccctcccacaaatggatttccagtgcggttagaggtcgcgcacgacgcggaacccaatccaatccccccgcgtctgcgggtagatggtgttgcggttgcccgagcgtgaaaacaccggtgcctcgccccaatcattgccgcgaatcatgtagccctcgcagttcggctccatccacgcactgccatcggtgggcgcgccgatgtagttggggtgttcgcagtcggccacgcgctcgtagacgttgccatgcatgtcgtacatgccgaaggcattcggcgggtagctgcccaccggcgatgaatagctgtagccatcggccgggccataggtgttggcgtgcttggcgatgctgtagtccttgccctcgtcgaacgggaaggggaacggtccggtggagccggcgcgcgcggcgtattcacgctgggcttcgctgaccatgtggtactgctggccggttttcttcgacagccaggcgacgtattgcttgatgtcgtccatgtccatgcataccgccggctggcgcgggccctgggggtagcgtggcttgctggcgatgcattcacggccgggacgggtgtcgccgtcggcgatcttcacgccggtctggcggatgtagctgtcccattcaccggaggtgatatggaaacggctcatggcgaacggcttggcgaaggtcacctcgtgcatcgggccttcatccggctcgcggccgacttcatcctcgggggtgcccatggtgaaggtgccagccggcagcaccaccatttccgggcagtccttgcagtccttgaacactttgccgggttgcggcgtggcggcctgggccaggttgggcagcaaggcgccgcacagggcggtgagtgccaatgccgtgaggggtttgttcatggggtcctctcattcaaagtggaaaagcggtgcattacacccgttggtccagcagcgtcatgaaacgctggatctcatcggaggaattaagcaggccgggcgaagtgcggatcaccgggccgacatcacggtccactgcgtcgatcaccacgcggtttttcatcatgtagtcggccacggcatcgctgtcctggcccttgacccggaagaaggtgaagccagccgacagctcgggactgcgcggggtgaccaactcgatacgcgggtgcgccagcaggtggtctttcagttcgctgttcagggcgtggatgcgcgcctgcacctgcgccttgcccaactgcagatgcagcttgaaagcctcatcggctgcccagcgatgctcgaaggcgtgataaccgcccggggtcatggtggtggcgaagtccttgtcttcggagaaggtcggcaccatcggggtcacgtactggttttgcgggtcgcgggcgcacaccacaccggtgccccgtgggccgaacatccacttgtgggtgccggcgatgaaaaagtcgcagcgcatgtccgggaagtcgaggttttccacgccgaaaccgtgcacaccgtccaccacatacaggatgcggtccctgtcgtcgcggttgcggttgtgttcttccaccagcttgccgatctcgccgatgggcagtttcacgccgctgccggactgtacccaggtcatgccgagtacacgggtgttggggcggatattgcgctggatattgcccagcacctcgtccacggacacctggttggcgtttttgaacaggctgatcttgcggacctgggtctgctccttgcgcacccggaagtccaggctgaactcggtagcgtagtgttcgtggacggtggtgaggatctcctggtcaggccgcaccttgatcccgccataaatcatcgccagcccttcggaggtgctgccggtgagggcgatctgcgccggcgtggccttaaggtagcgactggcccattcgcgcacctggccttcacgtttccaggtttcctgcaggccccagtccatggccaggcccgggttgcggtcgatctgcgcgcggtagcgctcgatggcttcgcgcaccggcttggggtgcgtggccaccaggaagttggaaaaatgcaggtagtccgggtcctggttgaacagttgcttgaaccccgtccatgggtcattcgatgcaggggcggcgatagcctggggcagcagggcggcgcccagtggcaggctggcggcaaataccccggcctgcttgaggaacgtacggcggtcggtcatggactggcttctggatgattaacggttggccaacggcttggcggatttttgtacctggtcccacacccgcaggaagttgccgccccacagtttggcgatatcggcttcggagtagccgcgctggatcagttcggcggtgacgttgcggatttcgccgacgttgttccagccctgcacgccgccgccatcgttgaagtccgaggcgaggccgacatggtcgatgccgatcttgcgcacggtgtagtcgatggcgtcccccaggtccttgagggtggccttgggttcttcatcgaggatgccgtacagcgcgctggcgtactcgccgaacttgtgttccggccaggcggcgatgatcgcgtcgcccggcatcaaggccacggccaggttgggcaggggcggcaggtcgaaccgtgcgcgcaggtcattgagcttgtcccgggtcggctggctcaacgggcgcaggtaggcggagaagcccacgatctgcactacgccgccgctctgcttgatcagttgcagctctttgtcgctcaggttgcgcgggatatccaccgacgcacgcggcgccgagtgggaggcgaccatcggtgtgcggctcaactgcgccacctgctccagggccttggtcgacatctgcgatacatcgatgatcacccccaggtcattgaggcggtgcaccgcttgcttgccgatgtccgacaaaccgtcgagggcgtcggtggagtcattgaaaaacggcagcgggcgcgacgagtccgaccaggcgttgttgcctacatagctgaagccgaacatgcgcatgccgcgcgccgcccacaggtccagcaggttcaggtcgttgcccagcgggtaggcgttgagcatgctgatgaagatcgcgaacttgccttcgccgtgcaggcgccggaaatcatccggggtgtaggcgatggcgacctggttggggtagtcgcgcaccatgccgctgatgatcttgtagcgcacttcctgttcgttgcgcgcggcttcgacaaaaccgtcggtgggcttgtgcggggcattggggccgttccagatttccggccagccgaaaatcgtcagcgccgcaccggacaagcgcccgcgtgccgctttggccaggtcaaactggccgctgccgtccttgtccgcctcgttgcctgcggtgccgaaatcgatgggtacggtgatatggctgtcgaacgacaacagccggtcctgcatttcattggcctgcttgatcacctccaacgggtaaccggcattgcccttgaaccagtgatcccagaccaggaaaccggctccggcaccgatggccagtgccaacggcaagccgatatacagcgcctttttcgaacgtggttttgtcattgccatctcagtcagttgaggccttcgctatcaggaaagaacgagtgataggcagggaaatttaggcgggcagggcgcgccggtaaatttccccggcgtgcaaacgttctagctctgataaagccgtttcctaaggtagacaatgaccatctctcgacgtgggttcatcgcaggcctggcgctgaccggcgccgctgtgccggccgccttctatgcccatcgcgagttgacgcgtgaagaagaattgcccatcacccccggcgaagccacggtagacctggccgataccgccggccagcacctagcgaacacgctgcgtggggtgtggagcctgcgcctggaaggccgcgacgccggcctcaagggcctgccgttggaaggtctggagttgctgctcgacatcgccccgcgtggacgtggcttgagggggtacctggacaccgctgccaacctgcgcgccaggggcgagccacgttaccgcgtgctgggtgacctgctgacaggggagagcgccgtgctctattggcgcctgatcgaccgcgacgcgattgacggcgtccccgcctatgagttcaagatgacccttgaccaggtctgggcggattttgccaatgccggcagcagcacactcagcggtcagatccttgacctcgaccggcccttggcgctggtcgagcgtgataaccgctttatcgcgcataaacagtggttccccgaggcccggcaacgcatcggtctgaacccgaccctgctggcctggctgatttcccccgaacaccgtctgttccaccaactgtggcatgccacccgtgaccagtggcacaaactctccgaagaaaagcgcgacgccctgcgcggcatcggctggcaacccggcccgcgtggccaggagcgcgacgcccggggcaagcgcaaggaccgcaacggctcgggtatcgacttcttcttcatgcaccgccacatgctcggcaccgcgcgctccatgcaggacctgccttcatggccgcaattccccgagccgcaaccggccttggagcgcgatcgcctgggctttctgcgctacttcgacaaccacgacggctttgcgctgccgcccacctggtgggcgccggatgacagcgactacacccagtgggtcagcgacatcaaggccgccgagacctatcacagcaatttccaggtgtgggagtcgcagtaccgcgacccgcgctacctggccagattcaccctggggcagctcggttccgaaatggagctgggcctgcacgactggctgcacatgcgctgggcctcggtgccccgcgacccgtccaacggtgcaccggtgcccatggcccgcgacccctccgacttcgccccgcgctggtacgcggcggaaaacgacttcctcggcgatccgttttcctcccacgtcaacccggtgttctggcacttccacggctggatcgacgaccgcatcgaagactggttccgcgcccatgagcgtttcaatccagggcaagtcagccgcatggaagtcaacggcgtagcctggttcgcgccgggccgctgggtggaagtcggcgacccctggctgggcccggatacccacggctgcagcaccaccccagggttgcagatgggccggtcgatggagatggacccggagaccatgaagctggcgctgcgcatcaccttcggtgaagacgaaaacaggctgcaggggctgttcaagcgggtgccgagacgaccgtggtacgcccggcacctgaaacttgcctgaacctgtagtgagcaggcttgccctgcgttggggcgcgaagcggccctaatccggccacctcgttttacctgaaagaaccagcggctttgatggggccgcttcgcagcccaacgcagggcaagcctgctcgccacagcaagctaaattgaaccaatcccgtcccaccttgtccccgcttcccatgtcaccccccgcccgccaaatcccttaattttccaagcctgccggaagcctctccaggcccccggctgcgcccgcgttttttgacggcggtgcgcccagcagacccgatccaaacggcagctgaaaacggactttcttctcaaccgtgacttatcaggcaggttacccccatgcagttcagcgaattattggcagcgatttccacccacgcgatccgtctgcaactggaagaaggcgacctgatcatcctgggtgacgacgaggcgctggacgatgcgctgtgggatcaactgatcgcccacaagccgcgcctgctggaactggtcgctgaacatggcggtgactggctgagcccggcctaccgcatcacgccggacatgctgccgctggtcagcctcgaccaggcggccatcgaccgtatcgtcgccgctatccccggtggcgcggcgaatgtgcaggacatctacccgctggcgccgctgcaggagggcatgctttaccaccatctgtcggcggagcagggcgatccctacgtactgcacgcgcagttcgagttcgacagtcgtgcacgtttgcaggcgtttgccgaagccttgcagtgggtgatcgatcgccatgacatcctgcgcacctcgatggtctggcagcgtctcgacgagccgctgcaagtggtgtggcgcaaggcaaccctgtcgtgcgaggccgtgggcttcgatgcgcgcaccgatcgcatggacctgggccaggcaccgctgctgcgcctggtgtacaccgcagatccagcggacgggcacgtggcggcaacgttgctgtttcaccacaccatcctcgaccacaccgcccttgacgtggtgcgccacgagatccagctgtacctggccggccaacaagcccaggccggtgagccggtgccgtttcgcagctatatcgcccaggtgcgccatggcgtcagcgagcaggcccatgaggcgtttttccgcgagatgctggcggatatcgacgagccgacgctgccgttcggcttgcaggacgtgcagggcgatggcctgggcatcgacgaggcgcgcgtccccgtcgacagcgcactgagtcgccgcctgcgtaccctggcccgcccgctgggcgtgagcgtggccagcatgatgcacctggcgctggcccgcgtattgggcgtggtcgccgggcgtgacgcggtggtgttcggcaccgtgatgctcgggcgcatgggcgcgggcgagggcggggagcgagccctgggcatgttcatcaacaccttgcccctgcgcgtggatgtgggcgagcagggcgtgcggtccggggtcaaggccacccatgagcgcctcaccgcattgctcaatcacgaacacgcctccctcgcgctggcccagcgctgcagtggcgtggcggcgccgacgccgttgttcagcgccatgctcaactaccgccatagcgccgccacggacatggccgaggtgatcgaggtggccgagggcatccgcgtgctcagtgccgaggagcgcaccaactacccgctgacggtcaacgtcgatgacctgggcgaggattttgcgctgacggtgatggtcgatgccgccattggcgccgaacgggtcgccgcttacctgcataccgccctggacagcctggccgacgcccttgagcagcgaccggatatgccgctcagcggcctgaacatcctgcccgacgccgaacgccacaccctgctgcacggcctcaaccacagccccacccaatacgccgataccgcactgatccaccatcaagtcgaagcccacgccgccgcccagcctgacgcgattgccctgcgctttgacaaccagcgcgttacctaccgccagctcaacgaacgtgccaaccaggtcgcccatcgcctgctggcccagggcattcgcccggatgatcgcgtggcgatctgcgtggagcgcggcccggagatgatcatcggcctactgggcaccctcaaggccggcgccggctacgtgccgatcgacccggcctacccgctggaacgcatcgcctacaccctggccgacagcgcacccttggcggtattggtgcaagccaatacgtgccatctggtcggcgacctgccacagatcgacctcaatggcttgcgcggcgagtccatcgtcaacccacgcgtcgacctcagcccggcccacctggcctacgtgatctacacctccggctccaccggccagcccaagggcgtgatgatcgaacaccgccaggttgcgcgcttgttcaccgccaccgaacactggttcggcttcaaccgcaacgacgtctgggcgttgttccattcctttgccttcgacttctcggtatgggaaatctggggtgcgctgatgcacggcggccagttgctgatcgtgccgcaactggtcagccgctcgccggacgagtgctacacgctgctctgcgaagccggtgtgagcgtcctcaaccagacgcccagcgccttccgccaattgatcgctgcgcaaggccagaacccccagtcccattccctgcgccaggtgatcttcggcggcgaagcgctggaaccgggcctgctcaagccgtggtacgcccgggcgatcaacgccggcacgcaactggtgaacatgtacggcatcaccgaaaccaccgttcacgtgacctatcgcgccctggaagcggcggatgcgcagttggtcggcgtcagcccaattggcgtacgcattcccgacttgcagttgtatgtgctcgatgcacgccgcgagccgttgccgctgggggtagtgggcgagttgtacgtgggcggcgccggggtggcgcggggttacctcaaccgtgaagcgctcaccgccgagcgcttcctggtcgacccggccagcggccagcgcctgtacaagaccggcgaccttggccgcctgctggcagacggcagcgtcgaatacctgggccgcaacgatgaccaggtgaagatccgtggcttccgtatcgaactgggtgagatcgaagcgcacctggccagcgccgagggcgtgcgtgacgcggtagtcatcgcccgtgaagaccagctgggcgacaagcgcctcgtggcctacgtgatagccgagggcgaactgcgtgccgccgacctgcgcgaccacctgttgctgagcctggccgactacatggtacccagtgcctttgtgctgctggataaattcccgctcaccaccaacggcaaactcgaccgcaaggccctgccggcgccggatgccgatgccctggcgcgccgcggttaccacgcgccccaaggcgcggtggaaacggccatcgcggcgatctggcaagacctgctcacgcttgaccgggtggggcgtgacgacaacttcttcgaactcggcggccactcgctgttggcggtcaagctgatcgagcgcatgcgccaggtcgatctcagcgccgatgtgcgcgtgctgttcggccagccgacgctggcggcactggccgctgcggtgggggggcagcacgaggtgcaggtgccggccaaccggattaccgccgccacccggcacatcaccccggacatgctgcccctggtggagttggaccaggctggcctcgaccacattatccagagcgtgcccggcggcgtcagcaatgtgcaagatatctacggcctggcgccgttgcaggccggtatcctgtatcaccacctgactaccaccgaaggcgatccctacgtgttgcaggtgcagttcagcttcgacgaccagacggcggtggacgcgtttgtccaggcgctgcacagcgtgatcgagcgcaatgacatcctgcgcaccgcgatcctctgggaaggcctcgacgagccggtgcaggtggtattgcgccaggcagcgctggccgtggagcgcatcgacgaaccgctggcgcagttgcagcaacgcttcgacccgcgtcacttccgcctggacttgagccgtgcgtcgctgatgcgctttgtctacgccgaagagcagggccgctttgtcggcatcctgctgttgcaccatatcctgctcgaccacaccgcgctgcaagtgctggtggaagaaatgagcgccagcctggccggcaacagcgcgcaactgcccgccgccgtgcagtaccgcaactacgtggcccaggcgcggttgggcgtcagccaggcgcagcacgaagcgttcttcagcgagatgcttggcgacatcgacgagccgaccctggccttcggcctgcaggacgtgaatggcgatggaagcggtatcatcgaggcccatttgcccttggagccggcactgagcctgggcctgcgcgaacaggcgcgacaactgggcgtgagcagcgcgagcctggtgcacctggcctgggcgcaggtgctggggcaggtgtccggccaacagtcggtggtgttcggtacggtattgctggggcgcatgcagggtggcgaaggtgccgaccgggcgctgggcatgttcatcaacaccttgccgctgcgggtcagcctcggtgccgtgggtgtgcaagccggcgtgcgcgccacccatgcgcgcctggcgcagttgctcgggcacgaacatgcgtcgttatccctggcccagcgctgcagtggcgtgccgggttcgctgccgctgttcagcaccttgctcaactatcgccacagcgcaccgggggaggcgccgggagacaacccgttcgcggcctccggcattcagatcctcagttccgaggagcgcagcaactacccgctggtgctcaacgtcgatgacctgggcacaggctttgccctcacggtacaaggcgtggcgagcctggatgtgcagcgcgtgggggactatatgctcaccgcgctgcgccatctggtgacggcgttgcaacaggcgccgaccacgccgttgcaggcggtgtcgatcctgccggccgccgagcgtcatcagatactggtggacttcaacgccaccgctcgcgagtacccggtgcacctcaccgtgcaccagttgttcgaagcccaggcgctggcccggccggaagcggtcgcggcagtgcagggcgcgttgtccctgagttaccgtgacctcaaccgccgcgccaaccgcctggcccatcacttgctcaaccagggtgtgcaacccggcgagagcgtggcgattgcactgccgcgttcgctcgacctgctgatctgccagttggcgatcctcaagtgcggcgcggtgtatgtgccactggacatcaacgcgccggtcgaacgccaggcattcatcgtgcaggacagtggcgcacaccgggtgctgacgaccctggccgacctgaacctggacgcgctgtcgccgcgcaacccggaactgccgcaggctgccgaaagcgtcgcctacatcctctacacctccggctccaccggcgcgccgaaaggcgtgcaagcgccgcaccgcgctatctcgcgcctggtgctgaataacggttatgccgatttcaatgcgcgcgaccgcgtggcgttcgcctccaacccggcattcgacgccagcaccctcgaggtgtgggcacccctgctcaatggcggctgcgtggtggtggtcgagcatgcggtgctgttgtcccaggccgcgttcgctgcgttgttgcaggagcaagccgtcagcgtgctgtggatgaccgccgggctgttccaccagtacgccgacgcgctgttgccggtgttcgcgcagttgcgctacctgatcgtcggcggcgacgtcctcgacccgcaggtgattggccgcgtgctcaggcacggcaagccccggcacctgctcaatggctacgggcctaccgaagccaccacgttttccaccacccatgagatcacccgggtcggcgagggcggtatccccatcgggcggccgatcgccaatgcccaggcctatgtgctggacccgcgccagcaaccgctgccgttgggtgtggttggcgagctgtacatcggcggcgcgggcgtggccacggggtatttgaaccaaccgcagctcaccgccgagaaatttatcccgaaccccttcggcgagggcctgctgtaccgcaccggtgacctggcctgctggcaggccgacggcaccttgctgtaccaggggcgcaatgacctgcaggtgaagatccgtggtttccgcatcgaacccggcgagatcgagacctgcctggccagtttcccgggcgtgaaggacgtggtggtgctggcccgcgaagaccagcccggcgacaagcgcctggtggcctactacacggccagtgtggcgctggagattgaagccctgcgcgctcacctgcaaggccgattgccggactacatggtgccctcggcctatgtgtggctggagctgttgccgctgaccgccaatggcaagctcgaccgcaagggcctgccggtgccggaccagagtgcgctgctcagccgtggtttcgaggcgccggaaggcgaagtggagacccagctggcgcagatctggcaggacgtgctcaagctggagcgggtcggtcgtcatgatcatttcttcgaactcggcgggcattcgctgctggcggtcagcctgatcgaacgcatgcgccaggtcggtctgagctgtgacgtgcgcgtgttgttcagccagccaagcctggcggcgctggcggctgccgtgggcagtggccgggaaatcgtggtgccggccaatggcattccacagggttgcacccggatcacgccggcgatgctgacgctggtgcaactcgacccggcggccatcgaacgtatcgtggcgaacgtgcccggcggtgcggcgaatgtgcaggacatctacccgctggcgccgttgcaggaaggcattctctaccaccacatcagcgccgagcagggcgatccgtacctgctgcaatcgcgcatggccttcgacagcctcgaacgtttgcacggcttcatggaagccctgcaacaggtggtggcccgtcacgacatcctgcgcaccggcgtggtctgggaaggcctggacagcccggtgcaagtggtttggcgcaaggcgcagctgagcgtgcaagcggtcgacctggacccggccgacggcgacatcatcgagcagttgcacgcacgcttcgatgcccgtcactaccgcctggacatcacccaggcgccgttgctgcgcatggtgtatgcccaggacccggagcatcaccgggtggcggcgatcctgttgttccatcacctggcgctggatcacaccgccatggaggtggtgggccaggaaatgcgcgcgttcatgttcaaccaggcgcaggacctgcccgaggcggcgccatttcgcaactacgtggcccaggcgcgcctgggtgtcagcgtggaggagcacgaggcgttcttccgcgacatgctcgccgatgtggatgagccgaccttgccgtttggtgtacaggacgtgcagggcgatgggcgcgatatcgaggaagctgaacaggctgtggatgccgcgctggcccaacgggtacgcgaacaggcgcggcaactgggcgtcagcgccgcgagcctgatgcacctggcctgggcacaggtgctggggctggtgtccgggcgtgacgacgtggtgttcggcaccgtgttgatggggcgcatgcaggccggtgacggcgcggaccgtgcgctgggtatgttcatcaacaccttgcccttgcgcgtggatgtggcggccactgccgccgctgcggtcaaggccacccatgggcgcttgagtgccttgctcggccatgaacacgcgtccctggcgctggcccagcgttgcagcggcgtggcaggtgcatcgccgctgttcagcgccttgctcaactaccgtcacagcagccccggtgaaatggcccgcgacggccacggcatctgggaaggcgtgcaactgctcggcggcgaagagcgcagcaactacccgctgaccttgagcgtggatgacctgggtgaaggctttgccctcacggtactggcgctgccgcagatcggcgcccagcgcttgtgcgcctatatgcataacgccgtagaacaattggtggcctgcctggaaaacgcaccgacgaccgtgctcaaccaactgccgatcctgccggcggcggagcgcgaaaccctgctgcgcgatttcaacgccaccgccgaggagttcccgcagaggcaaaccgttcatggtgcctttgaggtgcaggccgaacgccaaccccaggccgttgcggtggtgcaggacggtgaggcgctgacctacgaacagctcaaccggcgcgccaaccaactggcccatcatctgttggggctcggtgtacagcccgacgaccgcgtcgcgctctgctgccgtcgcggcccgcagatgctggtgggtttgctgggtatcctcaaggccggtgccggttacgtgccgattgacccggcctatcccgccgagcgcatcgcctatttgctccaggacagcgcgccggtggcggtgctggccgaagccactacccgcgacctgttgggcagcatcgccacgctggacctgcacgacccaggcctgcagcagtatcccgtcagcaacccacggctcaacgccttgaccccggcgcacctggcctacgtcatttacacctccggctccaccggccagcccaaaggcgtgatggtggaacaccgcagcgtggaaaacctggtgcactggcactgcgaagcctttggcctggatgcgacgagccataccagcagcgtggccggtttgggttttgatgccatggcctgggaggtctggccggcgctgtgcgtgggcgcgaccttgcacctgccgccggccgatctgggcaatgaaaacatcgacgaactgctggcctggtggctggcgcaaccgctggacgtcagcttcctgccgacgccggtggccgagtacgcgttcagccagcagctgcaacacccgaccctgcgcatcctgctgatcggtggtgatcgcctgcgccagttcacccacgaacggcgctttgcggtgatcaacaactacggccccaccgaagccacggtggtcgccacctccggccgtgtacgcgccgggcaggtgctgcatatcgggcgacccgtcgccaacggccgtgtctacctgctggacgcgcacttgcgtgcggtgccggtgggcgtagcgggcgagttgtacgtgggcggcagcggcgtggctcgcggttacctgaaccgcccggacctgaccgccgaacgtttcctgcaagacccgttcaacaccgggcgcatgtaccgcaccggcgacctggcgcgctggttgcccgatggcgctatcgagtacctgggccgtaacgatgaccaggtcaaagtgcgcggcgtgcgggttgaactgggcgagatcgaaaactgcctggcggccgcggaaggcgtcggcgaagcggtggtgctggtgcgcgacggccgcctgatcgcctggttcaccgcacagcaaccactggacatcgaggccctgcgtgcgcacttgcaagcccaattgcccgaggcgctggtgccggtcgcctatgtgcaggtgcaggcactgcccctgaccgccaacggcaagctggaccgcaaggccctgccgcagccggatcaagcggcgctgctgacccgcgaatacgcagcgccccaaggcgaggtggaaaccaccctggcgcgcctctggtccgaggtgctgcaggttgaacaggtggggcgccatgaccacttcttcgaactcggcggccactcgttgctggccgtcagcctgatcgagcgcatgcgccaggtcggcctgagtgccgatgtgcgcgtgctgttcagccagccgaccctgaccgccctggccgccgccgtgggcagtggccgcgaagtgcaggtgccggccaatcgcattactgccgattgccggcgcatcaccccggacctgctgacattggtgcaactcgaccaggcgacgattgatcacgtggtcgcccaagtgcccggcggcgccgccaacgtgcaggacatctacccgctggcgccgttgcaggaaggcattctgtaccaccacatcacggccgggcagggcgacccgtacctgctgcaatctcacctggcgttcgacaaccttgagcggctgaatgcctttgcccaggcgttgcagcaggtgatcgaccgtcacgatatcctgcgcaccgccgtggtctgggagggcctggcgcaaccgctgcaagtggtgtggcgcaaggccgagttggcggtgcaggcggatgtgcttgagcacctgcaccagcgcttcgacccgcgtcagtactgtgtgccgatgaaccaggcgccgctggtgcgcctggtgtatgcgccggacccggtgcatcagcgggtggtcgcgatcctgttgttccaccacattgccctcgaccacacggcgctcgacggcgtacgccacgagatgcaggccagcctgctcgggctgccgcagccgagcggtgcggccacgccgtaccgcaactacgtggcccaggcccgcctgggcgtcagcgaagcggagcatgagcagttcttccgcgggatgctcggtgatatcagcgagccgacgttgccgtttggcttgcaggatgtgcgcggcgacggcaacgccattgaagagctgcaactgaacctggacccgtcgctcaaccagcgcctgcgcacccaggcccgcttgcagggggtgagtgccgcgagcctgttccacctggcctgggcgcgggtactggccagcacgtccggccaggaacacgtggtgttcggcaccgtgctgctgggccgcatgcaaggcggccaaggcagtgaccgtgccctgggcatgttcatcaataccttgccgttgcgtgtcgacatcgatgggcgcggcgtacgcgctgcggtcaagcagacccatgcacaactgaccgcgctgctcggccatgaacacgcgtccctggcccttgcccagcgttgcagcggggttgccgcgccgcagccgttgttcagtgcgatgctcaactaccgccacagcgacagccggctggcgccggtgtcccaggcctgggaaggcatccagaccctggccagcgaggaacgcaccaactacccgttgacgttgaacgtggacgatcagggcgacggtttccgcctcaccgcgatgaccgcgcagtcgattggcgcgcaacgcatctgcggttacctgcaggtgaccttgcagggcctggtcgacgcgctggagcaggcaccgcagtgggcggtcaaccgcctgccggtgctggaggcccaggagcgtcagcaactgctggccggtttcaatgccaccgaagtggcttacgacctggagcagaccctgcacggcctgttcgaagcgcaggtgacgcggacgccggacgccatcgtcgtcaaggccgatgaccgcgtattgacctatgccgagctgaatgcgcgggccaaccaactggcccaccacctgctggaattgggcgtgcagccggattcgcgggtggcgatctgtgtggagcgcggcctggacatggtcatcggcctgtacgcgatcctcaaggccggcgccgcctatgtgccgctggacccggcgtatccgctggagcgcatcgcctacatgctcgacgacagcgcgccggtagcggtgctggcccagggcgcgacgcgggcattgctgggggacgtgccggtggtcgacctggaccagccgacctggcagcaacaacccaccaacaatccacaggtcgcggcacatggcgcctacgtgatctacacctccggctccaccgggcaacccaagggcgtgatcaacgaccaccccggcgtggtcaaccgcctgctgtggatgcaggacgcctatggcctcaaggcccatgaccgggtgctgcaaaaaacaccgttcagcttcgacgtgtcggtgtgggaatttttctggccgctgttcaccggcgcctgcctggtgatggcgcgcccgggcggtcacaaagacccggcctatctgtgcgaagtcatcgcgaacgaacagatcaccacgctgcactttgtgccgtcgatgctcgacgtgttcctggcccatggcgatgtaagccaggccgctggactggtgcgcgtgatgtgcagcggcgaagccttgcccggcagtctggtgcggcgcttcaagcagcagttgccggacatcggcctgtacaacctgtacggcccgaccgaagcagcggtggacgtgaccgcatggaactgcgcacggccggacgtcccggacaacacacccatcggcaaacccatcgccaacacccgcctgtacgtgctcgatgcacagatgcagcccgtgccattgggcgtggtcggcgagctgtatatcggcggcgtgcaagtggcgcggggttacctgaaccggccggagctgaccgccgagcgcttcctcaaggacccgttcaccggtggccgcctgtatcgcaccggggatctggggcgttacctggccgatggcactatcgagtacctggggcgcaacgatgaccaggtgaagatccgtggcctgcgcatcgaactgggcgaaatccaggcgcgcctgctggaacatccccaggtcagcgaagccgcggtggtggcccgtgaagagcggctcgtcgcctactacaccggcgctcgctcagccgacctgcgcgagcatctgttgcagcacctgccggagttcatggtgcctgcgctgttcgtgcacctggacgcgttgccgttgagccccaacggcaagctggaccgcaaggcactgccggcgccagacgccgatgccttgaccctgcgcgactacgaagccccggtgggcgacaccgaaatccttctggcgcaactctgggccgagctgctcaacgtggagcgggtagggcgccaggacaatttctttgaactgggcgggcactcgctgctcgccgtgagcttgatcgggcgcttgcgccaggaaggcatggaagccgatgtgcgtgggttgttcgaacagccgaccctggccggctacgccgcaatgactgaacgaatggagatcgtcctgtgagcattctcgaactgctggcgacgctgaaagccaaggatgtgcaactcgcgctcaagggcgagcaattgtcggtgcaaggcaacaagcaagcgctgagcgacccgttgatcctcgccgccctgcgcgaacataaaccggcgctgatcgagctgatcaaggctggtgactactcggcggccaacgaggtgccggccaatggcatcccggctggcgccacacagatcaccccggcgatgttgaccctgtccgagctgagccaggacgagatcgaccggatcgtcgccaccgtcgacggcggggtggcgaatatccaggacatctacccattggcgccgctgcaggaaggcattctcttccaccacgtcagcaccgagcagggcgacccctatgtgatgcagtcgcagttcgccttcgactctatcgagcgtttcgaggcgtttgcccaggccctgcaaggggtgatggaccggcatgacatcctgcgcaccggcgtggtctgggacggcttgcagcaaccctcgcaagtggtgtggcgcacggcaacgctgccggtgcaggcgctggagctggacccggccgacggcgatatcgccggccagttgcatgcgcgtttcgacgcccgccattaccgcctcgacgtgacccaggcgcccatgctgcgcctggcctgggccaacgacccggcacagcagcgcatcgtcgccatgctgctgttccatcacatggccctggaccacagcgccctggaagtggtgcgccatgaaatgcaggcgttgctgcaaggccacgccgggcaattggggcacgccgtgccgtttcgcagctacgtagcgcaggcgcgcctgggggtcagcgagcaacagcacgaggcgttcttccagcagatgctcggcgatgtgctggagccgaccttgcccttcggcctgcaggatgtgcagggcgatggccgtggcatcaatgaactcgactggccgctgacagacacactcaaccagcgcctgcgcgctcaggcccgcgtgcttggggtcagcgtcgccagcctgtttcacttgggttgggcgcgggtgctgagtgtgctggccggcaagtcccaggtggtgttcggcaccgtgctgatggggcgcatgcagggcgggcatgctacggaccgcgccttgggcatcttcatcaacaccttgccgtttcgcgtggacgtgggcgacgacgacctgcgcagtgcggtcaaggccacccatgcgcgcctcaccgggctgttgcgtcacgaacacgcgccgctggccttggcacaacgttgcagcggcgtggtggcgccgaccccgttgttcagcgcgttgctcaactatcgccacagcggcactggcaccagcagcgaagcggtggcggcgtggcagggcatcgagacactgcgttcggatgaacgtaccaactacccgctgaccttgagtgtcgatgacctcggcgaagggtttgtcctgcggctgctggcgactacccaggtcgatccgcagcgtgtctgcgcctacctgcaaaccgccctcgaccatctggtgacggctctggaggaggcgccgcataccgcgctgaatcagctggcagtggttcccgccgatgaacagcgcttgctgttgcagcacttcaacgccacccaggcggacttcccccaaggcgaaacgctgcacgcgcgcatcgaagcccaggccgcgctgagccccgacgccattgccgccgtgcatcagggccgccagctcacctatgccgagctcaaccagcaagccaacctgctggcccatcacctgctggcgctgggggtcaagcctgacgaccgcgtcgccatcgttgcccgtcgcggcctcgataccctggccgggctgctggcgatcctcaaggccggcgcctgctatgtgccggtggacccgtcccacccggccgagcgcctcaactacctgctcagcgacagcgcgccggtggcagtgttgacccagcaggcgctgttggagcgcctgccggccctcgaagtgccggtgatcaacctcgaccgctacacctggcagcaccattcggcgagcaatcccaaggtggcggtcacgccgtccaacctggcttatgtgatctacacctccggctccaccgggctgcccaagggcgtgatggtcgagcaccacaccgtgaccaacctggtggactggcattgccgcgcctttgacctgtgcgccgggcgccatacggcgagtgtcgccggcttcggctttgatgcgatggcctgggaagtctggccggcgctgtgcgtgggcgcgaccctgcacctgccaccggcccatgacggcgccgaggatgtcgacgcactgctggcctggtggtgtgcgcagccgttggatgtgagcttcctgcccacgccggtggccgagtatgcgttcagccagcagctcgaacacccgacgctgcgcacgctgctgatcggtggcgatcgcctgcgccagttcggccgtgcccagcgttttgacctgatcaacaactacggccccaccgaggccacggtggtcgccacctccggcaaggtcgaggcgggccagccgttgcacatcggcaaacccatcgccaacgccaccgcgtacctgctggatgagcaacagcagccggtgccgctgggcgtgacgggggagttgtacgtgggcggcaaaggcgtggcgcgcggttacctgaaccgcccggagctgaccgccgagcgtttcctgcacgacccgttcaaccccgggcgcatgtaccgcaccggcgacctcgcacgctggctgccggacggcaacatcgagtacctggggcgcaatgacgaccaggtgaagatccgtggcatgcgcatcgagctgggcgaaatcgaaacccagctcaatcatctggcgggcatccaggaagccgtggtgctggtgcgtgacgagcgcttggttgcgtatttcaccgaacagcgccaactcgacccgctggcggtgggcgatatccgcgcccacctggtggcgcacctgccggactacatggtgccggtcgcctacgtgaagctggacacgttgcccctgaccgccaatggcaagctcgaccgcaaggccttgccggcgccggacatggcggcgctgtttacccgcgagtacgtggcgccggaaggcgagatcgagaacgtgctggcgcagatctgggccgatgtgctgcaggtgcagcgcgtggggcggcgtgatcacttcttcgaactgggtgggcattcgttgctggcgatgcgcatggtctcgcaggtccgtcagcgcctgggtgtcgagttgctgctgggcgacttgtttgccaatgccgagttggcagcggtggctgaggtgttggctcagtcaggtcgcagcaccttgccggctattctcccggccaatcgcgatgaacccacgccgttgtccttcgcccagcaacgcctgtggttcctggcgctgatggaaggcgccaacaccgcctacaacattcccatcggcctgcgcctgcgtgggcagttgcatgtgcaagcgctgcaacgggctttggcgcgcatcgtcgcgcgccacgaaaccctgcgcagtcgctttgcccagcacggtgacgaggcccaggtggtgatcgtgcccgccgaagacgtgctgcccctgcaagtgcaggacctgcgccgccacccgcagccgcagcaggcgctggacgctctgatccatggcgaggcctcggcaccgttcgacctggagcgcggcccgctgctgcgtgggcgcctggtggtgatggccggcgatcaccatgtgctgttgctgaccctgcaccatatcgtttccgatggctggtccatgggcgtgctcacccgtgaactgatggcgctgtaccaggcctccagccacggccagcccgaccccttgccggcgttgccgatccagtacggcgacttcgccatgtggcagcgcctgtggctcagcggcgaagtgctgcagcgccagagcaccttttggcaacaggccctggccggtgcgccggccttgctcacgctgcccaccgaccgcccgcgcccggcgcagcaggactacgccggcagcagcgtcgcggtgcgcctggacgaacgcctcactgccgggctcaaggccttgagccaacgccacggcaccacgctgtacatgaccttgatgagcgcctgggcctcactgctggcgcggctctccgggcagcacgatgtggtgatcggctcgccggtggccaaccgcacgcgcagtgaagtggaagggctgatcggcctgttcgtcaacaccctggcggtgcgtatcgacacctccggcgagctgagcaccgaagcgctattggcgcgggtcaaggcccaggccctggaagcccaggcccatcaggacctgccgttcgaacaagtggtggagatcacccggccaccgcgcagcctggcccacagcccgctgttccagaccctgctgacctggcaggacagcagcgcaccgaccctggccctgggcgacctggccttggagggcatcgtcgaggacagccactttgccaagttcgacctgtccctggacttgtcggaagtgcagggcaccatcatcggtgcgctggaatacgcggtggcgctgttcgacgcatcgacggtgcagcgttacgtcggctacttcacccgcgtgttgcaggccatggtggacaacgaccaggccgtgctggaacaggtacctctggtggatgagcgcgagcgccagcacctgctgtttgatttcaacgccaccgaagtggcttatgaccttgagcagactttgcatggcctgttcgaagcacaggtgacgcggacgccggacgccatcgccgtcaaggccgatgaccgcgtattgacctatgccgagctgaatgcgcgggccaaccaactggcccaccacctgctggaattgggcgtgcagccggattcgcgggtggcgatctgtgtggagcgcggcctggacatggtcatcggcctgtacgcgatcctcaaggccggcgccgcctatgtgccgctggacccggcgtatccgctggagcgcatcgcctacatgctcgacgacagcgcgccggtagcggtgctggcccagggcgcgacgcgggcattgctggggggcgtgccggtggtcgatctggaccagccgacctggctgcatcaacctaccgaccaccctcaagtgcctgccatcagcgcctacgtgatctacacctccggctccaccgggcaacccaagggcgtgatcaacgatcaccccggcgtggtcaaccgtctgctatggatgcaggatgcctatggcctgcaagcccatgaccgggtgctgcagaaaaccccgttcagcttcgacgtgtcggtatgggaattcttctggccgctgttcaccggcgcctgcctggtgatggcgcgcccaggcggtcacaaagacccggcgtacctgtgcgaggtgattgccgccgagcagatcaccacgctgcacttcgtgccgtcgatgctcgacgtgttcctggcccatggcgatgtgagccaggcagctggactggtgcgcgtgatgtgcagcggcgaggctttgcccggcagcctggtgcggcgcttcaagcagcaattgccaggcagccaattgcataacctgtatggcccgaccgaagccgctgtggatgtgactgcatggaactgcgccgggccggtgacgccggacaacacaccgatcggcaaaccgatcgccaacacccgcctgtacgtgctcgacgcacagatgcagcccgtgccattgggcgtggtcggcgagctgttcatcggcggcgtgcaagtagcgcgcggttacttgaaccgcccggaactgaccgccgaacgcttcctcaaggacccgttcaccgatggccgcctgtatcgcactggcgacgtaggccgctacctggtggacggcactatcgagtacctggggcgcaacgacgaccaggtgaagatccgtggcctgcgcatcgagctgggggaaatccaggcgcgcctcaccgactacccgcaggtcaatgaagccgcggtgatcgcccgtgacaatcgcctgattgcctactacaccggggcgttcagcgagatcgatgccttgcgcacgcacctgttgcagcacctgccggagttcatggtgccggcgatcttcgtgcatctggagacgctgcccctgagccccaacggcaagctcgaccgtaaggcactgcccgcgccgggcctggactcggtggtggtgcgcgagtacgaagcgccccagggcgacacggaaatcgccctggcctgcctgtgggccgagttgctcaacgtggagcgcgtgggccgtcacgacaacttcttcgagctgggtggccactcgttgctcgccgtgagcctgatggggcgcatgcgccgcctcgggttgtcggcggatgtgaaggtattgttcggccagccgaccttgtcggcgttagccgccgcgttgggcggcgggcgcgaagtggcggtgccggtcaatggcattgctgccgattgcaccgcgatcaccccgggcatgttgccgttgatccagctggaccagccggccatcgagcgtatcgtcgcctgcatcccgggcggcgcggcgaatgtgcaggacatctacccgctggcgccgttgcaggccggcatgctctatcagcatcgcgccgcgcagggcggcgacgactatgtgttgcgggcgcagtttgcgttcgacagcgcccagcgcctggaggcgtttgccctggccttgcaggcggtgatccagcgtcatgacagcctgcgttcgtcgttccactgggacggcctggaagaaccggtgcaggtggtgtggcgcgaggccgcgctgcgggtcgaacgtgggccgatgccggagcggctcgacctgtcccaggcgccgctgatgcgcctggtggtgagtgaagacagtgccaccttgctgttccaccacctggtgatggaccacatcgccctggagattttgcagcacgaaatgcaggcgtttctctcgggcacccaacacaccctgggcgcgccggtgccgtatcgcaactatgtggcccagacccgcttgggggtggacgatcacgaggcgttcttccgcgagatgctgggcgagatcgacgagccgacccgcctggaaacccttggcggcaatgagcaggttcactgtgcccttgacctggcgttgagccaacgcctgcgcacccaggcccgacaatccggggtgagcgccgccagcctgatgcacctggcctgggcgcacgtgctgggcaaggtctcgggccgtgagcaggtggtgttcggcagcgtgatgctcggtcgcctgcaaggtggcgaaggggccgagcgggccatgggggtgttcatcaacaccttgccgctgcgggtcgacctgggtcggcacagcgtgcgcgacgcgttgcatgccacccacgcacgcctcactcaactgctcagccacgagcaggcgccgttggccttggcccagcgctgcagcggcgtgccggtgacgacgccgctgttcgatacgctgttcaactatcgccacagtgcgccgcaggtggcgagcgaggcttggcagggcatccgggtgctcaaggccgaggaacacagcaactatggcctgtcggtgagcgtggatgacctgggcgcgggtttctccttgaaagtcgtggggctgggcgcacgtcgcgtgtgcgactacctgcgcatcgccgtggagcaggtggtgcaggcgttggaacagggcggtacgacggccatcggccacgtgccgatcctgcctgccgccgaacgccagcaattgctcgacctgaacgccaccacccgcgcattcccgcgtgagcatacggtgcaacgtttgttcgaagcccaggcccatgcgcgtcccgcagccatggcggcgctgcatggcgagcaatcactcagttatggcgagctgaacagccgcgccaatcggctggcccatcatctgctgggccttggggtgcgtcccggcgatcacgtggcaatcctgctgccgcgctcgctaaacttgctggtcagccagctggccgtgctcaagtgcgccgccgcttacgtgccgctggatatcaacgctccgaccgagcgccaggcgttcatggtgcaggacagcagcgcggcctggttgttgaccggcagcgacgttgccgtcgactaccccgtgcagcgcctggacctcgacaccctggccctcgacccgcagccgagccataacccggatctgtcgcagtcgtcggacagcgtggcgtacatcatgtacacctccggctccaccggcacgcccaaaggcgtgttggtgccccatcgcggcatcacgcgcctggtgctgaacaacggctatgccgacttcaatgccagcgaccgcgtcgccttcgcctccaacccggcgtttgatgccagcaccatggacgtgtggggcccgttgctcaatggcggccaggtgcaggtgatcgaccatgccaccttgctcgacccggccgccttcggcgtggccttggcggacgcgacggtgctgtttgtcaccaccgcgttgttcaaccagtacgtgcagttgattccccaggccctggcgggcttgcgcatcctgctgtgcggcggcgagcgggccgacccggcggcgttccgcagcctgttggcgcaggcaccggcattgcgcctggtgcattgctacgggccgaccgaaaccaccacctacgccaccacctacgaagtgcggtcgctggccgagacggccgacagcgtgcccattggccgaccgatcgccaacacgcaggtgcatgtgctggacacgcagttgcagccggtgcctgtgggcgtgaccggtgaaatctgcattggcggcgacggggtggccaaggggtacctgaaccgtgctgaattgaccgccgaaaagtttgtgcaggacccgtttatcccaggcgccttgatgtaccgcaccggcgacctcggtcgctggacggcggagggcctgctggaatgcatcgggcgcaatgacgaccaggtgaagatccgtggtttccgtatcgaactgggtgagatcgaagcgcgcctggccggtttcgccggtatccaggaagtggtggtgctggcccgtgaagacgcaccgggtgacaagcgcctggtggcgtatttcacctgggccgatgagcccctcggcatcgacagcgtgcgggcctacctgcaaggccagttgccggactacatgctgccgtcggccttcgtgccgttggagcacctgccgttgaccgccaacggcaaggtcgaccgcaaagccttgccggtgcccgcgctggaagccttgcaccgccgcgagtttgaagcgccggtggatgctctggaacagaccctggcagcgctgtgggccgaggtgctgaagctggaacaggttgggcgccacgacagcttctttgaattgggtgggcactcactgctggcgatccgcctggtcaccctggtggaagacgctgggttgcacctgtccctggccgagctgttccagcacgccagcgtggcctccgttgccgcgctgttgcgccagcgtaccgccgcgccagtgggcgacacgtcggtgatcacggtgcgcggcagtggtgcgcaggcgccgctgttcctggtgcacgagttcagtggcatggacgtgtacttcccggcgctgggccagcacctgccgggtgactacccgatctacggcctgccgggcgtggccctgggcgaaccgcacttgaacaccatggaaggcctggcggcgcggttggtcggcttgattcgcggccttcaaccccatggaccttatcggctggccggctggtcgtttggcggcgtgctggcctatgaagtggcgatgcaactgctggggctggatgaggccgtggagttcctcggcctgatcgacagctacgtgccgcgcatgaccgaccagggcaaggcgcgctggagcgggccggacgcgctcaagcggcatttgctgttgcagtgcacggcgtattggaaagcacagggaggtgcggatgaactggcgagccttgaacacttggaggcagacgttggacagctggactttgcgcgcctgctgcaacgttgtcgcgatgaaggtgtgctgcacgcgcaaatggcggcggcgacggacgcggagctcttgaactatatccagcgcgaagtcggccacgggcatgcgttggcgcactacagcctgttcccgttgccggttccggtgtacctgttcagcgcgggtgagcgcccgactgagttgtcgcggcgcagtgagtcgctgggttggcaagaggtattggcgccggggcaattgcgccaggtacaggtgccgggggaccaccagagcatgatgcaggcgccgcatatccaggcgctcgggcgagcgatgagcgaggtgctaagggcctgttcgccggtggtgcaggcgccgcatcaacccatgttgcgtattcagagcggccgggcggggtatgcgccggtgttctgtgtgccgggtgcgggagacagcgtcaccggctttgtcggcttgggcgaggccctggggcgtgactggccgctgtttggcttgcagccgcgtgggctggacggtgaggcggtgccccatagccaggtggaagcggcggcggcgtgttacttgatggccttggaacaggagtgtgcgcaggggccggtgcatctggtcgggcattcgtttggtggctgggtcgcgctggagatggcgttgcgattgcaagcggccgggcgcgaagtggcgtcgttgacggtgatcgacagtgaggcgcctggtggggccgctaaggtgtacaccacgacggcggcgttgctgcgcttgatcgaggcgatgcagttgtcggccggcaggtcgctggggattgatccgggggattttgccgcgagtgatgaggtggcgcagcggcggcggttacatgccggcatggttggtgtcgggttgttgccggggcgttctgcggtgggtgcgatggaggggccggcgcgcacttatgcggcggcgttgcgtacagagtatcggccgggtgcgcggttcaagggcgtggtgcggttggtgttggcggaggatccggcgctggatgcggcggggaatcagcgggagcaagggttgatggtcgaggggtggcggcggcaggggagtgggttgcaggtttggtatggcggggggaatcactttacgttgctcaaggcgcccaatgtggttgggttggcgcgttggtgggtggatggggtggtggttggggaggtggtttcttgagtggattgtcggtgtacatatccgtcgcgtcggtaacggctagcccggcggcctcagggccgaccggtattgtgtttgtcgttcgcggctcgagtgtgggagggcgcttgcccccgatgacggtgtgtcagttgatgcatctgtggctgtcccactgcaatcgggggcaagccccctcccacagttttatctccatacatcaggtagatatcagcctgcttttgatctgctggtgatctggcgtttgatcccagacgccccgtaaaaccacgctgaccttcgttcgggcacaccgagcccgagtgtttgggcaagagcgttttgcttacttttgcgcttttcaaaagtgagccgccgtaagggcggaaccataagcggccgttacctaaataacggatatgtactcgatcaaaggccacccatggaaaagtcaaagttacgcaaactaggaatgctcacagtcatcacagtcgccatcggcctgatcatctacacggtccaggcccccgccgacgccccccaatacctcaccgccaccgccgaacgcggtgacatcgaaaacgccgtcctcgccaccggcctgctcgaaggcatcaaacaggtcgacgtaggcgcccaggtctccggccaattgaaatccctcaaggtcaaggtcggcgacaaagtgaaaaagggccaatggctcgccgaaatcgacccactggtcctgcaaaacaccttgcgcaaagcccaggtcgacgaagaaaacctccaggcccaacgccgcgccacggcggcccagctcaagcaggccaagtccgtgtacgagcgctacaaaggcctgcagatcgacgagtcggtttcacgccaggattttgaagacgccgagtccaacttccaggtgcaacaggccaacctgctgtccctggatgcgcagatcaaaagcgcccacatccagatcgacactgccaaggtcaacctggcctacacccgcatcgtcgcgcccatcgacggcgatgtggtgggcatcgtcacccaggaaggccagaccgtgatcgccagccagctggcgccggtgctgctcaagctggcggacctggacaccatgaccgtcaaggcccaggtctccgaggcggatgtgattcacatcagccccggccagcaggtgtacttcaccatcctcggtgaagccgacaagcgttactacgccaagctgcgcggcaccgagccggcgccgcagaacttcctggaaacccagaccgccggcacgccaaagcagaacacggcggtgttctataacgcgctgttcgacgtgcccaaccccgatcaccgcttgcgtatcgccatgaccgcccaggtgcgtatcgtgctcgatactgcccaggccgcgttgatggtgccggtggcggcgctcggtgcgcgcaacaacgacggcagctacccgctgcgggtgctggatgccaagggcaaggcggtgtcgcgggatgtgaagaccgggatcaacaacaacgtcaaggtgcagatcctcgacggcctggccgaaggtgacaaagtggtgatcggcgacgcaacccctgctgtggcggggaactgacggatgacccagccactgttggaactcaagggcatcacccgcagtttcatggccggcgagcgtgagttcattgcgctcaagggcatcgacctgacgattcatgccggggaaatggttgcgatcatcggcgcctcgggctcgggtaaatcgaccctgatgaacatcctcggcggcctggattacgccacggccggcagctacaagatcaatggcatcgaaacccgctcattgggcgacgagcaattggccgaactgcgccgtgactacttcggctttatcttccagcgctaccacttgctggcgcacttgagcgctttgcataacgtggagatgccggcgatctacgccggtacatcggaaaccgcgcgccatagccgtgcgcgcgagctgctggcgcgcctggggctggcgggccacaccagccaccgtcccagtcagctgtcgggcgggcagcagcagcgggtgagtattgcccgggcgttgatgaacggcggtgaagtgatcctcgccgacgaacccaccggcgccctcgacacccacagcggcaaggaggtcatgcgtatcctcgctgaactgcacgccgccgggcatacagtgattatcgtgacgcacgaccccaaggtcgcggcgaacgcccagcgcatcgtcgaggtgtgcgatggcgagattgtcagcgacaaggccaatgacagtgtcggcctggagctgcccagcgaaacccccatcgagcctaaacgcagcggcgcccggcgtctggtggcgagcctggggcttttcaaggaggccttcaatatggcctgggtcgcgctggtgtcccatcgcatgcgcaccttgctgaccatgctcggtatcgtcatcggcatcacctcggtggtgtcgatctcggccatcggcgaaggcgccaagcgttatgtgctcaaggacatccaggccatcggcagcaacaccatcgatatcttttccggcaccagtttcggcgacagccgcgcctcggccatcgagaccttgatgccctcggatgtcgacgcgttgaaccagttgtattacgtcgacagcgccacgccggtggtgggccgcaacctgttgctgcgctttggcaatatcgacctggacgcgcaggtcaatggcgtgagtgaccgctatttcaaggtcaaggggctgaagctcgaagcgggtatcgccttcagcgaaagcgatgcacgccgccaggcccaggtggtggtgatcgaccacaacacccgccatcgtctgttcgggccgaacgtcgacccgttgggccaggtgatcctggtgggtaatctgccgtgcacggtgatcggcgtgacggccgacaacaaaaacatgttcgccgccagcaaggcgctgaacgtgtgggtgccctatgaaacggcggcggggcgtttgttggggcaacgtcatctggacagcattactgtgcgcatcaaggacggccaaccgagcaaggtggtcgaagacaacgtcaacaagctgatgctgcaacgccacggcaccaaggatttcttcaccaacaacctcgacagcatcatgcagacggtgcagaaaaccagccgctccctggcactgttgctgtcgttgatcgcggtgatttcactgctggtgggcggtatcggggtgatgaacatcatgctggtgtcggtgaccgagcgcacccgtgagatcggtattcgcatggcggtgggcgcccggcaatcggacattcgccagcagttcctggtggaggcggtgatggtgtgtttgatcggcgggctgatcgggatctcgctgtcctatgccctgggctttctgttttcgttgtttgtgaaggaatgggagatggtgttttccctgggctcggtcatcaccgcgtttgcctgttcgacattgatcggcatcgtgttcggctttgtgccggcgcggaatgcggcgcggctggacccgatcgaggccttggcaagggattgaggcctgcttgccaatgagaacccaatgtgggagggggcttgcccccgattgctgtgtatcagccacaatttatattgctgacccaccgccatcgggggcaagccccctcccacattcagaccggtgtcgtcttaaaaaccagccgtgtcctcggtggcatacatccaccgcaacaacgaatgccgcccgctgatccccaacttgatcgccgcgcgtttcaggtaactctcgatggtgttgaccttcaacgccaattgctccgccaactccggcgccgtgcgcccggccagcaggccgacgcacacttcgagctcacggttggagagggtcagccccgattgcaccaggcgttcctcgatgcgccggcgcagggtttcgaggccctggttttccggggtcaccggttcgctgtccaggcggcacggctggatcgcggcgatgtgtttttcgaccatgggcaacagcagggtggagaagtcctgcagcatgctgcgctcctgcggcgagaaattttcggactggtgtgagcgatacaccgacaacacatagcgcacgtcgtcgcggcggcgggtgaggtgcaattgtgccgcaggttgctcttcgcccaaggcttctaccgagtcggtgtagaccgggctgatcttgcgccggacctgcccttcggcactcagttgcaattgcctgatatgggtggcgtccacggccagttgggtgaggatcaggtcatgcagcatgcgcggaaaatggcggctgccggtgctggcgatgaccttgccaatatggggaaacagctgtgagttcatcaattcgtccatgaggcgtgcaggtattcggccttatagcgacggggattaagaggcatgccaatgcgaataacctgcggtgataatccttcccgccggaacctatgctagtacagcctggcggcgggaaggggatccaatctaaaaaaattggattagacactcacgagtttggacttgtgttgcggcgtgcgcgtgcatttggccagtgcctgctgcatatcggccagcaggtcggcgacgtcctcaaggcccaccgacaaccgcaccagcccttcgctgataccgtgccgggcgcgttgctccggggtgtaggtggagtgggtcatgcttgccgggtgctgggccagtgactcggcgtcgcccaggctgacggcacgggtaaacagcttgagggcattcatgaagcgccggccggtttcgattccgcccttgagttcgaaggcgatcatgccgccgggcattttcatctgccgtgtcgccagttcgtgttgtggaaaagaacgcagccccgggtaagtcacgcgctccacggcggggtgtgcctgcaaggcctcggccaccgcctgggcgttgctgcaatggcggtccatgcgcagggccagggtcttgaggccgcgcatcaacagcgaggcatcctggggcgacatgacggcgccggtcaggtccttgaggccttgcaggcgaatgcgctgggccagcgcctggctgctcacggcaatgcccgcagtgatatcgccgtggccgctcaggtatttggtcgccgaatgcaccaccacatcggcgccgagttccagggggcgttgcaggtagggcgtgcagtaggtgttgtcgaccactacggtgatgtcgggttgctggtgggcgagggcggcgacggcggcgatatccaccagttgcaggttggggttggccggggtttcgcagtagatcatgcgggtcgcggggctgagtgcggcttgcagggccgccaggtcagtgaggtcgacatgccgcaccttgatgccgaactcgccgatgccgtggtgcagcagggcgaaggtgcaaccgtacagcgtctggctgacgatcacctcgtcgccggggcgcagcagggtccagaacgttgcggcaatcgcccccatgccggaactgaacgccaccgccgcctcaccgttttccagggtcgccatgcgtgactccagcagtgccagggtcgggttggaaatgcgcgtatagaagtggccgctggcttcccctgcaaaacaggcggcgccgtattcggcggtggggaaggcaaaggtggcagacaggtaaatcggcgggacgagcgcgccgtggtggtccttggggtcgtagccgtggtggatggcgcgggtggaaaagccgaatgcattgtgtttattgttcatgtcggacgctccttgtttcctacaatgctatgctcataaccacagatgaattttgcgatatttgctgctaattcccgcgtcctgggatgaaaacctcataaaaataacgaatagaggcacgttatgcctgtcagtctggatcgcaccgataaagcgcttttaaacgcgttgcaaggtaatgctcggctcaccgtggctgaattggccgaccgcgtttccctgacgacctccccgtgttggcgccgggtgcgcaacctggaggagagcggggtgatcagtgggtaccaggcgattctctcgcccaaggcgctggggtatggggtgacggcgtttgtcagcatcatgatggagagtcacacccaggacattgcccgggcattcgagcagcggctgttggagattcccgagattgtggcgtgtcataacgtgtcggggcggtatgattttttgttggaagtggtggcgagggatctggagtcgtttggggagtttgcgcgggaggtgttgcagacgttgccttgcgtcaaggagatttattcgagtttttcctataagtcggtgagggggttgcgggtgattccggtgccggggtgattgggtggtgtgttgtgtacatatccgtttcttcggtaacggctacttagggttccgcccttacggcgggtcacttttggaaggaccggaatgccggcccagccaaaagtaagcaaaaggtcctcgccccaacactcggcacctcgcctaggctcggtgtgccctcactccggcttgaatccgtgggccgccgtcatgggccatccctggcccaggacggctaacccggcgtcctgccgggttacccacggattcaagcctgcgttcggccagcgtgtttgacggggcgccccagatcaaaagcaagagcgcggcggccttagagccgaccggattgtatggcccgtactcggtcaaagtgtgggagggggcttgcccccgatggcagtgggtcgtcactgatgagttggctgacacaccgccat

SEQ ID NO: 38 - DNA, 60447 bp, Pseudomonas nodulensis
  misc_feature (332)..(358): n is a, c, g, or t
agacacgcaactggaaccctatcgggacggtgtacctcaatcccgaaagggagctgacagttgtcgtgaaggtcgcctagcaagacgggagacacgacaactaccttgaaaaacgccgggctctggctctggcctttgatctgcttttgattttgatcttaggcgccccgtcaaacacgctggccggaattcggcagggatttggggggtaaaccggcagggatgccggtttagccgcctcgcgccatggatggcgcgtggcggcggccccccaaatcactgtcgaattacgggcataccgagcctaggcgaggtgccgagtgttggggcannnnnnnnnnnnnnnnnnnnnnnnnnntcaaaagtgagccgctgtaagagcggaaccctaagtagccgttacctaaataacggatatgtccccaatccaacccaaccccccccaaacagcacgtacatccaattttccccaccccatcccccctcaaactccctcatcgctgaatcttcaaggcagagggacaccccatggacccaaccacaaaaccaggccccgacgaagtcgtcaccctggtggtcaaacacctcatcaaacccggcctggaggccgactacgaagcctggctgcgccgcatcgtccgcatcgccggcgaccgccccggccacctcggtgtcgacgtggtacgcggaaaacaaggcaacctggcgcttttcacctgtgtattgcgctaccgctccaccgaagacctggaaacctggctcgactcccccgagcgcaaaaccctgatcgccgaagccgcgcccatgctcgccgacggcgacaacaccgaaatcggcgcggtcaacgaattctggttcaaccccgaaaccccaaacgccgccaagccgccgcgctggaagcaggcggtggtcaccctgtgtgtgatcctgccgctgaccctgctggtgccgatcgtgtggggcccggtgctgcgcctgcacccgtttctctccaactacgtggtcgccacgttcctggtgaccgtgaccatagtcgtgctggtggtctacctgctgatgccggcggccacccgcctgttcgctccctggcttgaagcctctgtaaaggaaaccctatgaacgccgatctgattctgttcaatggccagttccacaccgtggaccgtgaaaacccgcgcgccacggctgtcgccatccgcgaggggcggtttgtcgccgtgggtaccgacggtgaagccatggccctgcgcggcagtggcacccaggtcatcgacctcaagggccgaaccgtcatccccggcctcaacgactcgcacctgcacctgatccggggcggcttgaactacaacctcgaactgcgctgggagggcgtgccgtccctggccgatgccctgcgcatgctcaaggaccaggccgaccgcaccccgacgccacaatgggtacgcgtggtagggggctggaacgaattccagttcgccgaaaaacgcatgccgaccctggacgaactcaaccaggccgcgccggacaccccggtgttcgtgctgcacctgtacgaccgcgctttgctcaaccgcgcagcgctgcgtgtggccggctacaccaaggacacgcctaacccgccgggcggcgagattgtgcgggacagcaacggcaaccccaccggcatgctggtggcgcggccgaacgcgatgattctgtattcgaccctggccaaaggcccgaaactgccgttggagtaccaggtcaactcgacccgccagttcatgcgtgaactcaaccgcctgggcctcaccagtgccatcgacgccggcggcggtttccagaactaccccgatgactatgcggtgatcgagcaactggccaaggaccaacagttgacggtgcgcatcgcctacaacctgttcacccagaagcccaaggaagaactcagcgacttcaagaactggaccggcagcgtcaccctgcaccagggcgatgattacctgcgtcataacggcgctggcgagatgctggtgttctcggccgccgacttcgaagacttcctggagccgcgtcccgacctgccgttgaccatggagcaggagctggaaccggtggtgcgccacctggttgaacagcgctggccgttccgtttgcacgccacctataacgagtccatctcgcgcatgctcgatgtgttcgagaaggtcaaccgcgacatcccgttcaacggcctgccgtggtttttcgaccacgccgaaaccatcaccccgcagaacatcgagcgtgtgcgtgccctcggtggcggtattgcgatccaggaccgcatggcgttccagggcgaatattttgtcgagcgctacggcgccaaggccgccgaagccacgccgccgatcaagcgcatgctcgccgaaggcgtgccggtcggcgcgggcaccgatgcaacgcgggtgtcgagctacaacccgtggacctcgctgtactggatggtcagcggccgcaccgtcggtggcctggaactgcatgccgaaggcttgccacgcctgaccgcgctggaactgttcacccacggcagcgcctggttctcgtccgagcagggcaagaagggccagatcaaggtcgggcagttggcggacgtggcggcgctgtcggcggacttcttcagtgtcgatgaagaagccatcaagtggatcgagtcggtcctcaccgtggtcggcggcaaggtggtctacggcgccggcgacttcgaagatttcgcccccccgcgcgtgccggtgctgccggactggtcgccggtggtcaaggtgccagggcactggcgcccaggctcgccgttgcaggcgcaggtgcaccagtgcaacggcccgtgcggcgtgcatgcccacagccacgaaaaagcccgccattccagcgtgccggtcagcgacttccagggtttctggggtgcgttcggctgctcgtgttttgcattttgattacccatacccccgtaaggagttgaaccatggctagccctcgtttgaacaaagatgacgccgttgtactgttggtcgaccaccagactggcctgatttccctggtgcaggatttctcccccaacgaattcaagaacaacgtgttggccctggccgatgtggcgaagttcttcaagttgccaaccatcctcaccaccagtttcgaaagcggccccaacggcccgctggttccggaactcaaggaactgttcccggacgcgccgtatatcgcccgtcctggccagatcaacgcctgggacaacgaagacttcgtcaaggccgtcaaggccaccggccgcaagcagatcatcattgccggtgtggtgacggatgtgtgcgtcgcgttcccgaccctgtgcgcgctggaagaaggctttgaagtgttcgtggtcaccgacgcctccggcaccttcaacgaaaccgtacaacaagccgcctgggcgcgcatgactgccgccggcgcccaactggtgaactggttcgccgtggcctgcgaactgcagcgcgactggcgcaacgacatggaaggcctggccaacctgctgtcgccacgcatccccaactaccgcaacctgatgaacagctactcggcgttcactgccaagtaactggctcaggttattccttgtgggagggggcttgcccccgatgacggtgtgtcagtcacaacttctctgactggcccactgctatcgggggcaagccccctcccacaatttgttttgtggtgtgtccactaacaggctataaatccgagaaatgtccaccgagaagcgacaatgaaccccttcgaagacatgcgcctgttctgccaggtcatggaatccggcagcttcaccgccgccgccgaacagctgggcctgtccaagcagttcgtcagccgccgcctgatccagctggaagaccgcctcggcgtacgcctgctcaaccgctccacccgccggctggatgtcacgccactcggccagagttactacgaatccgccttgcgcctgctcagtgaagtcgagcaagtggagcagggcatcgctggccagaacagcgaaccacgcggcaccattcgcctcagcgcaccgttgtcgtttgccatggcccatctgggctgcctgttaccgcttttcctgcagcgccatccccaggtggcggtggaggtcgacttgagcgaccgtcccgtggacctgatcggtgaaggctacgacctggttttgcgcatcggtaccctggaagattccaccctgatcgcccggcgtatcgccagcattccccgggtgtactgcgccagccccgactacctggccttgcgtggtacaccgcaaaaacccgatgaccttgccgaccacgattgcctgccctacggccacggccgccaggtgcagtggcgcttcaagggcaagttgcaggcgctgagcgtgagcgggcgcatgcgggtgaacaacggcgacttgctgcgcgataccgccatcgccggtctgggcgtaacctacctgccgacctttatcgtcggcgaggcattgaaggacggccgcctggtcacggtgctggatgaattcgcccccgaagacctgacgctgtcggcagtgtacccgcagcaccggcaaagctcgcgaccggtgcaggcgctggtggagttcctgcgcgaacgcctggctagcggctgttgaagagctggcggatcaggttgggcgtactgccggtccagcgcttgaacgaacggcgaaagttcgccgcatcgttgaagttcaggtacgccgccacttcatcattgctatagcccttgacctgatacaggtgcaacgccacctgcttgcgcacgcggtccacctgctgctgaaagccggtgtcatgcttgtgcaacttgcgcttgagggtcgccgggctcatggcgaaggcctgcgcagcctgttccaggctgggcggttggcgtacctgttcgcgcaggtagtcgtagaggcagtcgagaaagctgctggagaagcccagttgttcgatctgcacacgggcttgctggcgtgccacctggccggcggtggccgaggcacctggccaggcgcgggtgaggtattcgcgggggatgctcagcatgtccagcggccgttcgaagcgcgtctcttcgtccagatgcacccaatactgctcgacgtaacgcggctcggcatgactgaaactgcacgcccacggcaggcgctcgccgctgagccattggctcatggcgaccagcgaggtcatgctggcttccagtaaaaaccgccaatgctcgccggcgccgcaactgtctcgccagtacaggtaggcgtggtgcgcatccaactccagttgcagggtggccagtgggctgagcagcacctgttgctggatcaggatctccagggcctggtgcaggttctgcgcatgccccagggcatggctggccgcgccgtagtagccgggcaagagccgctggccgaacagaaaactgctgtcgtcggcgtcaagcaatttgcgactgttgccgatcaacccgaaaaactgctgcgggctcaaccgcgccgtgccggccaggatgtcctcgtgaaacagtcccgtgccgcgcagcaggcgatggctgtcgatgtcccgggacaaggccaggtcgatcagcgtggcgggttggtagtgccctggtatgaagcggctgtcggcttcataccagctggttttcacggccatctcaggcgcttttcgccagaggttgcttggccctggcgagggccaggttgaggcgcttgagcaagtcctggggcggctcgtccagggccatgaccacggcggtggtcgccgccagttgcaggcgctcaccgtgcagtcgggtcttgtgtgcaaggccgcgcactgcctgctgcaactccagcgccagttccttggcctggcgctcaccggtgttgggcagcagtaccacaaaacggtcgccggccaggcggcacagcagatcctggcggcgcaggttgagcaacagcaaatggctgagggcctgcagcaccgcatcgccttcggcatgcccgtaggcctggttgatggccgcgaagttgtccaggtccagcgccagcagcgacagcggttgctgctgggcctggctgtcttgcaggctctcggccagctggcgcttgaggtagtcggcgccggccagcggcgtgagtttgtcgaacagccgatgctcacggaacagtcgctcgcgtttctccatctgtgcgctgatcgccagttgttcgcggtgccagtggtagataccaatggtcagcaggatcatgcccaccggcatcggcccggactccagccagtggtcccaggtaatgctgtcgggcaggcggatgaattcgtcgaggctgtcgatccaccacgagaagaagatgcatgacaggcccagcgccaggtagttggtcacgcgcccggccggtcggcttttcagcaccagccctagccagatcagcgcgagcagggcggaaccgccttcgccgaagatatccagccacacccattcgctgacgcttttcaactcgccgcaggccaggtgcaggatcagccccaggtttgcggcgatcagcagcagggagagtttccagcggtggggtttgagcacggaaaacatggccgcgagtccttgcaaggttcagtcgtgggcgccagcacagcagatggatgtgacggttgcgtgacgcagggcaggggtcgaatcagctcatcccgccgacaatgaaacgcagaaaatgtgggagggggcttgcccccgatagcggtgggtcagtgaaaaatcagggggctgatccactgctatcgggggcaagccccctcccacagttgatcttcacaggtcatttcagctcattccaactcaagatcctgctcaagcccccggtttacggggctccccgccactcgctgtcacagaacggtcatcccccacccctagcgtgccctcccagttgccgggcctcttgcctggcgccaacggactcttggggaggattgcatgtacaagcgcaccgggctcgtcagcttcacgcttactgccttggccctggcgattgccagcgagcgactcaacgcggccgaagtggccaacgccgagcacgtcgaagtggtcggccaggcagcggccatcgaccaggcgctcaaggagcaacgcaattcggacagcatcaagagcgtgatacatgccgacggcgtggcccagttgccggatgaaaacgtcgccgaagcggcgcagcgcctgccgggcatcagcgtggagcgcgaccagggcgaagggcgctttgtcagcgtgcgtggcctgggcccggacctcaacagcgtgaccatcaacggcaccctggtacccgccccggagagcgctcgccgcgcggtggccctcgatgtgctgcccgcggagctggtgcagtcgctgtcggtgatcaagaccctcaccccggacatggacgccaactccctcggcggcacggtggatgtgcaaagcctgtcggcgttcgaccacaagggcctgttctacaccggcagcaccgaagccagttacgacaagaacacccatcagaccagccccaaattctccggcgcggccagcaaccgtttcagtcttggcgacggcatcgacaatttcggcgtggccgctgcactgagctggcagaagcgcgacttcggctcggacaacgtcgagaccggtggcgcctgggacttcaccgacggtgctcgactcaacgagttcgaacagcgtgactacgacatcagccgcgaacgtgccggtggcggcctgaacttcgactacaagcccgacgacctcagcagctactacctgcgcaccctctacagccgctacaaagacaccgaaacccgcaactccaccagtctcgaattcgccgacccgcaggcccccggccagctgggcgatgccgagggcaagcgcaagctgaagaaccgcgaagagacccagcaaatccagtcctacgtgttcggcggcgaacgcatgctcggcctgtggaccctgagcggccaggccggctacagccaatccagcgaagacagcccggcacacatcgccggtgccaccttcgacggcggcgactttgccaacagcggtttccatgacaagggcaagccacgcccgatcatcggcagcggcttctacgacgcgcgtaacttcagcctcgacaaagtcgactgggaaaaacagaacacccaggacaccgagaaaaacctgcgcctggacctggcccgcgactacgacctgagcggctatgcgtcccaggtcaaattcggcggcaaggtcagccgccgcaacaaggacaacgatctggaagcctgggtctacaaagacttcgacaccctcggcttcactgccgaccagctcaacctcacccagttccagaagggcaacgtcgactaccgcctgggcaattacggccccggcatcagccccagcgcgatcaagcagctgatcggcagcctcaacccggcggacttctatgacgagaccgaatcgcgggtcaacgacttcaccattcgcgaggacatcaacgctggctacctgatgaacactgtcgatattgacgactggcgcttcatcgccgggctgcgttacgaaggcactgagttcgaagccaagggcaccggcgccaccgatggcgtgttcaccccgaccgacacccagcgtcgctatcaccattggctgccgggcctgcatgcgcgctaccagatcgacaagaacacccaggtgcgcgcggcctggaccaagtccgtggtgcgcccgacctttggccagttggcgccgggcttcgtgatcgacgatgacgaagccaccttcggcaacccggacctcaagcccctggagtcgagcaacctggacctgggcatcgaacacttcatgggccgcgccggcaccgtctcggcgttcgtgttctacaaggacatcaagaatttcgtctacaacactgacctggccggcaccggcgcctggaccaacttcgccgaggcccacacctacgccaacggcgacagcgccaagctctacggcctggaactggcctactcacagaaattcgactggctgcccgcgccgtggaacggactgctgatcggtgccaacagcacgttcagccgctccagcgccgacatcgaaggtttcgacagtgccagtggcacgaaccgcaagcgcaacatcagcctgcccaaccagtccgacaccgtcggcaacctgatgctcggttgggaagacgacacgctcagcttgcgcctgtcggccaactacaaatcggcctacctctacgagttggcctcgatcaacgacaaggcccacgacctgcatgtggacgcgcagacgtttgtcgacttcagcgcgcgctactcgctgaccaagaacctgcaagtcagcttcgaagcgcagaacctcaccgatgagtcgtacttcgtctacaccggccaccgcagctacaacggccaatatgaagagtacggcccgacctacaagctgggcctgaccttcacccacttctaacccacacctcgattccattgtttttgacggattgacccgtacatgaagatttccaagctgtacctgctaatggccttgaccctctgtgcaccggcaatggccacggacctggtcctgaccccttgggcacccagcctcaatgccgaggccatggccgtgctgagcagcaccgaacgcctcaccgccagtacccgcaacggcctgcaactgctcgacgccaaaggcaccgaactcgcccgcttcaacggcaacttcagcagcctcgacacccgcgctgccggctcccaggtactgctcgccagcctcgacaacgaccgccagcaagccatgctgatcaacctcgacgcgtccgccaaaacctttggcaaaccgctgtacctgcccacccgtgactacccggtaaacggcctgtgcctctaccgtgacggcgccgccaacctgtttgtgttcctggtgggcgaagagggcaagggtgagcagtggctggtgggcaacggctcgacgctgctcggcgacccccagcgtgtacgcggtttgccgttgccgccgtcggcgcagttctgccaggtggatgacacaacccaacagctggtggtgaatgaagcaaacgtcggctggtgggcctacccggcgcacccggaagccgaggtcgagcgcacgccggtagcgctgttcgacaaccccaagcgtgaagcgggcgccatggcgctcgtgccgggcgggatggtcgccctcgatccgaagacggcccaggtgcacctgttccagcacaccggcacgcgttgggtcgagcaatcgagcctgacgctgccaggcctcaaggaaccggaacaactcagcgtcaacggccagcaactgctggtgcgcgacgacgacaccggcaggctttaccagggcacgctcaactggaaagccaaacccgtgacgaccgaaccggtggtgccggaagtcgctgcggtgcgccagaccgacccggtcggtcgccagggcgatgcggcggacgacccggcgatctggattcaccccgcgcaaccggaaaaaagccgcgtgctcggcaccaacaagaagcagggcctgctggcctacgaccttgacggcaagctgttgcaggaactggcggtgggccgtctcaacaacgtcgacgtacgccccaacttcaagctcggtgcgcagactgtcgacctggccgtggcgagcaatcgcgatcacaacagcctgagcctgttcagcatcgaccgccagagcggcgaactgcgcgaagccggtgaagtaccgacgccgctcaaggagatctacggcatctgcctgttccagcccgccagtggcgagctctacgcgatcgccaacggcaaggacggcaccttcctgcaataccgcctcagcgcgccggatggccgggtgcagggcgagttggtgcgccagttcaaggtcgacagccagcccgagggttgcgtggccgacgaccagcgccagcgcctgtttatcggtgaagaagacgtcggcgtgtgggcagtggatgcccgcgccgaccagccggccacgcttgccagcgtgatcaaggtcggcccgcagttgcacgcggatgtcgagggcctggcgttgtaccagagcaaccagcgcgactacctggtgatctccagccagggcaatgacagctacctggtgctggatgccgagccgccgttcgccagccacggatccttccgcgtcggcctgaatgcggcggccgggatcgacggggcttcggaaaccgatggcctggaagtcaccgccctcaaccttggcgggccgtggagccaaggcatgctggtggtgcaggacgggcgcaagcgcatgcccgagcagacccagaacttcaagttcgtgccgtgggccgaggtgacccgcgcgctgaaattgccctgagccgtcatcacccggtcatcacttttttatcgaataggagcttcaccatgcacgcgacgatggaacatatgacgatctggggcttgatcagcgacgccagcctgttggtcaaggcggtgatggtcaccttgctgctggcctccttactcagttggtacctgatcatccagcgcgccagtgtgctgcggcgcctggagcgccagttgaatggctttgtgcagcgctttcgtgccgcgcccgacttgcaacccctgtaccgcgacaccgtgcaggcaggcgagggcggtattgcgccgatcttcattgccggggtccaggagtaccagcacctgcacagccatgatccagcggtgctggaaggtgtagagcgcgccttgcaggtggcgatcaccgagcaggaaatcgagttggaaaagggcctgcaattcctcgcaacggtgggttcggtcagcccctacatcggcctgttcggcaccgtatggggcatcatgaattcgttcatcggcctgtcccaggtgcaacaggccaccttgtccaccgtggcgccgggcatcgccgaagcgctgatcgccacggccatcggcctgttcgcggccattccggcggtgatcgcctacaaccgcttcgcggcacgcggccagaccttgctcacccgttactacgccttcggcaatgagctgcaagtacgcctgcaccgcacgctgcgcggcacgtcgagccacctggccgtggccgcctgaacaggagcgatctcatgttagcaaggccgcaacgcaagcacgggcccaaggccgagatgaacgtggtgccctatatcgacgtgatgctggtgctgctggtgatcttcatggttaccgcgccgatgctcacccagggcgtgaagatcgagttgcccaaggtcgccgccgaggcactggccaccgacacccgccagcagatcctcacgctgtcggtgaaggccgatggtggctactactggaacctcggcggtgaactcgacacccaacaccagaccgacagcgccgtgaccctcgacgaaatgggcgccaaggtcatgcaggtggtggcggcgcgcagcgacacccaggtgtacatccgcgccgacgataacgccggttatggccgtgtggtcgcggccatggcggtgttgcagaagggcggggtgagcaacctggggctggtgaccgaggccccgcaatgacggcgatgatcatgcacagtccgacgctgacgatgccttcccgggggccttccgggttctggcgaaacagcttggcggccagcctggcggtggcgctgcatgtgggcgtgctggctgcgctgatgcttggctggtcgacggaaaaaccgccggtggaagcccccagggtgatgcatacccagttggtgatgctgccggctgcacctgcgccggctcccgcacctgaaccggtggctgtcacgcccccggaaccggtcgcggttcccgtaccggtgaagcccacggtcgatccgcagatccaggcgcgcaaactcgaacaggccgccttggcgcgcaagcgcgtcgaggaaaagcagcgggagcagcaacagcaacggttggccactgaacagcgcaaccgtgagcaggcacaacagcgtgctgaccagcagcgccaggtcgctgaaacagcaagagctgcaacacccgctgcggcgccggcgttcgacagccgccagtaccagcccttgagcaaggaggcgccggactaccccgagcgcgccctggacaagcacatcgaaggcgattgttcggtggaatacaccgtcaacacccagggccgcgtggaaaaccccagggtgctggacggctgccacccgctgttcatgcggccttcactggcggcggcgaataccttccgctaccagcccaggatcgtcgatggcaaggcggtgccggtgccggcggtgcgcaataccttccactaccgcatccagtagccggcgatcaattggcacggttgtacagctcaacactggcaacataccgctgcaggttcgccaggaacgtatcggcaatttcctccttgctctgggtggaaattgccgaggtatgcggcgacagcctaacccgcggacgggtgtacaacgcatgcccgtccggcagcggctccggctcggtcacatccagcgacgccaagccaacctgcccattgtccagcgcctccagcaatgcttcctgatccagcaagccaccgcgtgcgatgctgatcaggtgcaaacccggccaggcgctggcggagcacctcgttgtaatcctcgtccagctggctggcgataaccacctggctcatgtgcgctccttgtggcgttgggcgaaggcagccttgccgacaccttgtaataccgcgtcgttctgcggggtatgcacgcggctgcacagcacgtcgcggtagtgccgttgcagcgggctatggcgcgacaggcccgggttgcccgaggcctcgatggccagctccacggcacggatcgcgttgttggttaccaggtacttcaattgcgcggcgttggcggccggggtgtggccttcggcagcagcgtcgagcaggctgcgattggcaaacagcagggtgtcgatatggccgacggtttcctggaaacgcggcagggtcgacagcgccgcaccgagattggacggttggcgctcctccagccagttcaccagccagtcccgggcggcctgggccacggcgtcatacaccgacgacagcagcaccgacatccacaggaaaccctcggggtccaattctggcgacggcgcactccacgggctgacgctgacggcgtggtccagcggcaccagcacgttgtcgagcaccacttcatggctacaggtggcgcgcatgcccaggtggtcccaggtgtcgatgatactcacgccggggctgtccttgggcaccagccaggcgcccaccagcgggtcggcgtcgtcactgcggccccacacgctgaaccagctcaggccgtggctgccggtggagtagatcttgcgtccgctgatgcgccagccctcggcggtgcgcacggcggtggtcgccggcagcccgccacgggccggggtgccgaggtcgggctcgacgcgcagggcgttgatcaatgcgccgttgcgcaccgcgtcttcggccacttgcctgcgcaggtgcgcgggccaggtcttgctgtcttgcaggcgggtgtgttgcaggtactgcatcaccaggatcagtgcggtggacggctcgcccttggcaatcgcactgatcgccttgcgtgcctgggacaggctggccccgccgccgcccagcgccttgggcacggtgagggcgagcaggccgtgttcgtgcagcaacttgaagttggcgtgagggaaagcgccgctctcgtcgtagacttgcgcggtactggcgaactcggtggtgagacgttcgagcagggcgtcgaactgggcgacttccacggagcgcaaggagggctgcgaggatgggctcatgccagcgcctcttgctgcgcttcaacctcggcggcgacgctgtagcggttcaccggcacgtccaggccgaggttgtcacgcagggtctggccgctgtattcgctgcggaacaggccgcgctgttgcaacaccggcaccaccagttcggtgaagtactgcaagccatccggcagcaccgagttgatgatgaaaccgtcactggcgccgtgctcgaaccaggtctggatcgcgtcggcgacctgttccggggtgccgacgaaatcgcgcttgggtcgcgagaaacgcagggccacttcgcgcagggtcaggccttcgtccctggccagttgcttgatgcggtcggagccgcctttctggctgttggaccccaggtcccccagttccgggaacggcgcgtcgagcgggtattggctgaaatcgtggtcgttgaacgggcgaccgagggcgacgatggcatcttccacggtgaccagctccacggcctgctggtagcgactttccacttcagcttcatcgcggccgacaatcgggcggatgcccggcaggatcgacaggttttgcgggtcgcggccaaagcctttggcgcggcgtttcaggtcttgggtatacgccaggccctcctcgatgctgtccacgtgcacaaagatcgcatccgacttctgcgccgcgaagttgcgcccgtcctccgaggtgccggcctggaaaatcaccggttggccctggcgcgaacgcgcgatgttcagcgggcctttgaccgagaagaagtcgcccttgtggttgagtgcatgcagcttgcccggggcgaaaaattcgccggactgtttgttgtaggtaaaggcgtcgtcttcccacgaatcccacaggccctgcacggtgcttacgtgttccttagcgatgcggtaacgcacagcgtggggcgggtgctcggccttgctgaagttgtcggcggtgccgctgagccatgaggtgaccacgttccagccggcacgaccgccgctgatatggtccagggacgcgaactggcgcgccacctggtagggctcggtgtagctgacggtcaccgtggcgacgaggccgatatgtgtggtgatggcggcgagtgccgacaggatagtcagcggttcgaaacggttgaggtagtgcgggctggacttggcgtggatgtgcaggctgtcggcgatgaacacgaagtcgaacttggcggcttcggccaattcagtctgctgcttgtagaagccgaagctggtgctggcatttggttgggcctgcgggtggcgccattcgccccagccgtgaccgacgccatggaccatggctcccagtttcaaatgacgtggcttgctcatgtgctgctccttttagcgcgaggcttggttgaaggggacacgcttggcgttgaagctcttgtcgaagccctgcgacacgtcgatgtgcttgagcagcaggccttcctgttgataggtgtcggcggtcgcttgcaggccgctgatcactgcgtcgtcgatcgtgaccgggttcaggcgggtgtccttggctaccgtcacgtgcacgtccagcggcaggccggtgatcctggcctgggcggcggcgtattcatcggggtgggtattggcccaggcataggcgcggtcaacgcgggcgacaaagtcgtcgagctgcgggcgcttgtcggcgatggcctggctggtggcggcgaggtacaggtggttgctcaacagttggttgccgctgatcagcacgcgggcctggctttgcgaggtgaccacggtggtgtacgggtcccaggtggcccaggcatcggcggtgccgttatccagcaccaggcgtgattcgctgggcagcaggaaaatgaactgcacatccttggtcgtcaggccggcggtggccagggccttgatcgccaggtaatggccgatggaaccgcgcccggtgacgatcttcttgcccttgaggtcggcaacggtcttgatcggcgagtccttgggcacgaccagggcggtggtggtgcgcccttcggagtggatgatgctgaccaccttgagggaagcaccggcaccgagggcgaacacgtacggcgcatcaccgagggcgccgatgtccacggcaccggcgttgagtgcttcgcccaacggtgaggcagatgggaattccgaccactggattgtgtaaggcacgttttggctttcgccagaggcttccagtagcgccttgattgtcgatttctggtttgccacccgcagcggttgcaggtcggcggcagcggcgctgccgatcaggccaagggcgagggcggtgcccaggagcaggcgtttgaaagggcggttgtcgagcatggggcaaactccaggcgtttggtgtctttcaagggatacctccgcctggagaaggggtcggattccatcgcatgtacggggtgggtcagatcacatggaaaccgtgggtgccgtcgcgtgccaactggtcgaccaggccgaattcccagtccaaataggcttgcatggcttccctggggttgtcggtgccttcgtacgggcggcggtagcggtcgatacgcggcgaggccaggtgggtttcgcctgcttccagcggcagttgcgcgttgatccagccggcagtgccgtcctgcagcaggaacacctgcttgccggtgagggtttcgacttcagccaccgccaggcgcgccagttggctgctgccgcaggtcagcacgtaacgctgggcggcgggcaccttggccagggcctcggcgagttgtgcacgcagtacccaccaggctccggggatatggcgcttcacgtagttggcgctggcggtgaaatccagcaccacagtgtcgccgtgggagagccagtcgacgagggtatgggggctgatcagttcggcctggggcggcgccggtaccggcgcgacccaggcgccttgctcgctgaagtgcgccgcttgcaggtcatccagcacgtgcacttcccagcccaactgggccagccaggacgcggacatgtttgcgcgcacaccgtcgtcatctgccagtaccagccgggcaccgcgcacgctggcgaagtgatcggtttcctgcaccagttgcccgcccggtgtggagcgtgcgcccggcaagtgcccggcttcgaattcttccggggtgcgcacatcgaacaggtaggtggtgcgtgtggtttgctgctgccaggtgcgcaggtcgctcagggtggcacggccaacgcgggccttgtcggcgacacgccgcgcatccacggctgcgatctggcggtgctcctcggaggtcggcgcaaaacgccgcgattggccatgggcaagcttctgcccggccagggtccagccgatggtgccgttacgcagggccgacaccgggttggcaacgccggcattgatcagcgattgggtgccgataatgctgcgggtacgcccggcgcagttgacgatgatgcgggtggccgggtccggcgccagttcgcgggcgcgcaacaccagttcggcccccggcacgctgatgccggtgggaatgctcatggtctggtattcgtcgaaacgccgggcgtcgagcaccactacgtcggcctggctgtcgagcagcgcctgcacctcttcagcggccagggacggcgtatggcgttcgctttccaccagttcgccgaacgccttgctcggtacgttgacgtcgatgaacagctcgccaccggccttgcgccaaccgtccaggccgccttcaagcaggctgacctgggtgtagcccaaggcaaccaggcgttcggcagcgcgggcagccaggccttcaccattgtcatacacggtgacctgggtatcgcgccgcggaatgcgcgcatacacctccagttccagcttggacagcgggatgttcgcggcaaacagtggatgggattcggcgaacggcgcttcttcgcgcacatcgatcagggcgacttcttcttggtccaacagggcttggcgaatccgcgcaaagctgcgggtggagagggtggtcatagggcagggctcttttctttggacaaatcccagatattcgggaggaaggcgttggaataaccggagataaacagtttctcgctgccatcgggctggtacaccgcgcggcgcaccgcaccgatattggcgccgtacacatggatgctgatggacacctggtcgctgtgggcgttgctcacctgatggatgtcaccgaccctgggcgacaccgcttcaacctggcccggcaccagctggatcggcttgccttcggccaccaggcggccgtcaggggcgcgttcaaacccttgggaaaactctgagccgcgcagcatgccaatcaggccccacacccggtggtcatggatgggtgtgctttgccccggcccccacacaaagctgacgatgctgaaacgctggcgtgagtcggcatgcagcaggaactgctggtagcgttcgtgatcgggttgggcgaattcgtcgggaagccagtcgtcatggctgaccagttgcgccagcagcttgccgccacggtgtagcaggtcgccttcgcgtgggttgccgtcgatcaattccgccagggcgcctatgaaggctctgagtctctcggggtgtcgggcctgggtcatgacagttccatcgtgcggtcggtggtgatgggtttatctaagcataatgttaatagttaatatgctattttttaatgattagcttatagctgaaggtaatttagaactggtctgaatagcgttagacgttatcgatcacagcgcgggctattcaggcagctttcctgcaactatgcttcgcacacatcttaatgacggttctctatgtgcggcccaaatgaaaattgacgatatcgatgcctttgtcgaagtgattcgttgccagtccatcagccacgccgccgagtcgttgcaactgacccagccggccattacccgtcgcgtgcagaacttcgagcaggcgttgggggtggagttgttcgaccgcaacaccaaacccctcaagcccacgctgatcggcacccgcgtctacgagcagtgccgcttgatcctgcgcgagatggacgccttgcgcgaactggtggccaccgatgcaccacccactggcctgttgcgcctgggggtgccgcagaccatcggcgatgtggtgttgctggatgcgctcaagcacctgcgcaccgaataccctgacctgcgcgcccaggtcgctacggggtggggcagccaactggtgggcaaaatcgaacgcggtgagctggatgcggcggcggcgctgttcccggcgggcaagatcttcccggacaacatcgtcggcgagtccatcggcaagatggaactggtggtggtgtgcgccaaggcccagttgccgaagaaaccttgcaagctggcggatgtgtaccagaacggctggattctcaacccggacggctgcggcttccgtgcgggcttgcagcggaccttgtccgatcagggccttgcgctgcgggtcaacctggaaaccttcggcaccgagctgcaattgggcctggtggcggacggcctgggcctggggctggtgccgcgcccactgctggaacgcagcgcccatcgcgagcacctggcggtgatgccgctcaaggacttcaagccggtgatggacctgtggctgatctacccgcacttcctgggcaacctgcaagggccggtggatgcgtttggcaagctggtggctgcctcgttgcacaggatcaaggacgctgcctgatatgaaaaaaaataataattagcttagattaaaatgtgctttttattatttttttgcatcccctaggcttgcctggaagtccttaaggccatccaggaagttttgccatgagtagcgtcaccccgatttccagcgtttccagcaacaccgtccgccaacgcgttactccgcaagaatgggacgtgcgcgtcaagctggccgccgcctatcgcctggcggccttgtacaaatggaccgaccatatctatacccacttctccgcccgcgtgccggggccggaggagcatttcctgatcaacgccttcggcttgctgttcgatgaaatcagtgcgtccaacctggtcaaagtcgacctcgacggcaccatcgtggatgacccgacgggcctgggcatcaactacgccggctatgtgatccacagcgccatccacggcgcgcgtcacgacctgcaagcggtgctgcatacccatacccgcgacggcatcgcggtgtcggcgcaaaaagacggcttgttgccgatctcccagcattccatcggtttttccgggcgcgtggcctatcacggttatgaagggattgccctcgaccttgacgagcgcgagcgcttggtcgcggacctgggcgacaaaagcgtgatgatcctgcgcaatcatgggttgttgaccgcgggggtcagcgtggagcatgcgtttcagcaactgcagcaacttgagcgggcctgcaatatccaggtcgcagcgcaggcagcggggaatgcggagttgatcttcccgccgcaggaagtggtggagaaagtcgagcaacaggccaaggcgcacgccagcggcgaaggtccgggcgtggcgcggcattggaatgcgctgatccggcagttggagcgcagcgataccgactacaaaaactgagcttaatgtgggagggggcaagcctcctcccacattggtttttgtgttgtgctcaggcgacttgtttggcctgttcgcgttgtgcgatcagttggcgggtgagggggatcaggcgcttgccgtagtcaatcgcatcattcagcggatcaaatccacgaatcaggaacgtggtgatccccaggtcgtaataatccaccaaggcctccgcgacctgctctgcggtgccgaccagcgaggtggagttgccctgtgcaccgagcaacccggcaattccggtccacaagcgcttatccaggcgtgagccttgcgccgctgcagcgagcaagcggcgcgagccttcgttgggcggttcacgccgtacaaagccatttttctcggccagctcggtggcttgctgcaagatcctgtcggcccgtgcccacgccagctcttcggtctcggcgaggatcggccgcaacgacaagctgaagcgaatcgtgcgcccatgcctggctgcttcggcgcgtacctgggtgacgatctcgcgcacctgctcgtaggtttcgccccacagcgcatacacgtcggcatgcttgcccgccacttcaatcgccgctttggacgagccgccgaaatacagcgggatatgcggctgctgtggcgacttcaccgtggagtacgcaccttcgacctgatagtaggtgcccttgaagtcgaagggctgctcgctggtccattcctggcgcaccacgctcaggtattcgtcggtgcgggcgtagcgttcgtccttgccgatatggctgccatcggcgcgcagttcacggtcgtcgccgccggtgatgatgtgcaccgctgtacgcccgccgttgaacacatcgagggtggtgaattggcgcgcggccagggtgggctgggcgaaaccggggcggtgggcgatgagaaattgcagtctggtggtcacgctggcggcgtgggaggcgatcagcgtgctgtccgggctgttggagtggaaggccaccagggcgcggtcgaaaccggcgtcttcgtgggcgcgggcaacgctctcgacgtagtcgggttgcagggtagggccgctgcgcggatggatctcggaagcgtgatggccgccaatgtagccgatgaattcgatgctcatggtctgtccttgtcttgggtgtgattaccacctccaccgggcagggggtcggttattcgcgtccaaagtaggggcaggggcggggtctgtaaaatgccgattggttctaacctaattattaaaatgtggaattattaaattggctgtgtatcagtaaattgcatttttagaatgccagggcgaatcacccgctggcttttcatgtgccgaggctgactttagataacgttgtattttccctggcactgaggtctgatgggcgccgaaacgggcttgccggattggggaactatgcgggcagaacttgcgcaatatggcggcattaccgtcatgattccggccgctatcatcatcgccgtgtggttgcggtattccaaccctcgggcactgagggcctggatcataacggttggtgtggcttattcagtggtcgcgctcagcaagttgctgttcaagggctggggcctgtcatttcagcacttggacattgccgtcatcagcggccatgccatgaatacctgcctgatgcttaccgtggcgctgagcctggtggcccgccagttcaatccggcattgcgctggccggcggcaggtgcggggttactcgccagtgcctggtttggtgcttactgtgttgcgccgtacatacatccactcaatgaagcactggccggtgtcaccgtgggggctgtcgcggcgattgcctttctctggcgcattgagaccacccacgtcagggtgtccccttcgttcatcggcggtgggctggtggtgttgctggcctgcacactggtgcccaagttcaatgccgagttgctgctcaaccgggttgccatcaccttgtcgggtgccgaccaggcccatcaagcgccttcctggcggctggatgcggcacacacaaaggccgagtaagtcaccaggtccagcgcccggtggctgtccaccatcagttccagcaacaccgtctgcgcattgaaacgccgcatatcgccgcgccgccgtgcctcgttcatctgcttgagcagcgtatgggtgatctgctgcggtgagctgccgtgcagttgctccagccaacggccgatggcctgggtattgcgccggtattgggtacccactggcggcttggcgaaaccttcgaacatcccggtgagtcttctcagcgcatagctgcgtatcacgtcatccaacaggctcatggccgctcctcagtgccgcagatgttcgccagcagctcggcggtcttgaccagcatgaactggctgtcaccgcgactttccacgcacaggcacaccgacagcgcatcactcacctgcaacttgaagcgccaatcggcgaacaccatcgacagtccggaacaggattcatcgctgtccagggaattgtcgcggtataacacctgcatgcgctcgacgacgcgggtcgagttattcacttcgacatgaatatttcccgaagaaggaaataggccaatacgctctaccaataactttgacatgttcatggccgtctcttcgttgttgcggtcaggcggcactttattctgtgggagggcaaaagtactggaatgttatttttagtcggttatgccgggtgttgttatttttagtctgcctcggcaggtggtcgaagtaccgcggttgtgatcataatcgcctcgctgcttgaagtaaggtcatcccttttactaccgggttaatacagtcggcgcgtgggaggttgccttgttcaataggattttgattgtgtgtgtcggcaatatttgtcgcagccccacggcagaacaattactgcgcaatgcgctggcgcactccgcgatagaagtgagttctgcggggttggccgcattgcgtgacagcccgctggagcccacggctctgcgggtgctggaagagcacgggcatgcaccggcttcacacagggcacgtcaactgacaagcgctgcggtgagtgacgcggatcttgtactcgtgatggagcaacggcatatcgacggggtactcagcctcgcgccggaagcacggggcaaagtgttcctgctaggtaaatggcaatacaaccgcgagatcatggacccttatcgtcaaggcaaaccagcctttgttcatgcctatgcgttgatagaacaagcggctcaggcgtgggcgcaaaggttagtcggtaaagttggttaaaagtcgtcatgtaacacacttgataagttctgcgttaatcgtgcatggagccgggcgtcttgcaccctgtgccattccttgactattggttggaaaaaagaactgacttatgcaatcaacacccgcaacagcgtcgcataacggcgaagaaactgatctggatttcatgatgttgttgggcacgttgctcgatcacaaatggctgatcggtggcatcagtatcgtctttatggcgctgggcgtggcctatgccgtgttgacgcctccggtctatcaagccaccgcactgattcaggtcgaaccgaaaaaaggcgacatgctcggcttttccgatgtcggcagcctgctcggcaaggagtcgcccacggtcacggaggtcgagttgatccgctcacggatcaccgttggcactgccgtcgacaacctgaacctggacctcgaagtgaagcccaagcgcttccccttgatcggtgatttcatggcgcgtcgcttcaagccagcgcaagcccatgaggtggcgaacccctggctcggcctcgacagttacggttggggtggcgaggccctgaagttttcgcggttgcgccttccggctgacttgctgggccaggaactgaccttgactgccggtagtggcagcacctttaccctgtcggaccaggaccaaaacgtgttgctgacggggcaggttggtcgcttctatgaaagcagcggcctccaactgcaggtcgaaacgctggatgccaaccctggcgcgcaattcagcgttgtgcgttcgccacgcctcaccagcattctgcgctatcagaagctgctggatgtggcagagcgcggcaaggagtcggggatcattggcctggcgctggaaagcacgcggcccgaggcggccattcaggtactcaatgaggtcgcccgtatctacgtgcgccagaacatcgagcgcacctccgccgaggcggcccagagcctggccttcctcaaagaccaattgccccaggtgcgcaaggatgtcgagcaggctgagacggcgctgaaccagtttcagatccgcaacaaaaccatcgacatcagccttgaggccaaggccattcttgaccagatcgtggcgctggatgcgagcatttccgagctcaagatgcagcaggcagagatcgagcgaaagttcaccccccagcacccggtgtaccgcgcgctcctgacgcaactggcagaactcacggcccgtcagagcgagctggccaagaaggtcgaaagcctgccgaccacccagcaagagttgctgagcctgacccgcgacctcaaggtcagcaccgagatctacacgcaattgctcaacaagtatcaggagttggatgtgatgcgcgccggcaccgtcggtaacgtgcgcttgatcgataccgccgatgtcgacctgaggaacccggtcaggccgcaaaaagcattgatcgtggtgatcgccacgctgctcggtgcctttgttgcagtcgcgctggtgctgtttcgcaaggcgctcaatcggggcgtgtccaaccccaacgagttggaaaaactcggtttgccggtgtatgcggccatcccgttcagtgccattcagaaggacatggaccagaagctctttcgcagcaacaagttgggctccacacagttgctggccctcagcaacccaacggacctggccattgaagggctgcgcagcctgcgcacgagtctgcatttcgccatgttggaagcgggcaacaaccgcttgatgatctccgggccgagcccgcaggtgggcaagacattcgtctcggcgaacctggccgctgtggtcgcgcattcggggcagcgtgtgttgttggtggacgtggacatgcgcaagggttacttgcacaaagtctttggcgttgcggcagaaaacggtctgtccgacctgctcgccaaacgctgcgagctcaccactgcgatccatcccacggaggtcgagaaccttcacgtccttagccgtgggcggatcccgccgaacccatcggaactgctgatgcacgccaacttcagcgaattcctggaacaggtcagcgcgctgtacgacctggtgattctggatacaccgccattcctggcggtcaccgatgcaaccatcgtcgggcggcagtccggcaccaatctgatcgtggcccgtttcgagttgaactctgtgcgcgaggtggagctgacgatgcgtcgctatcaacagaacggcattgaactcaaaggcgcaattttcaacggtatcgagaagcgctcatccgccaaatacggatacggcgcctacagctattaccactacgagtacaagtcagacagcgtttgatcctggacgccaggcatttgaagtccaacgcgcaacacgtctaccactggccgcaggttcaacgagaaacgctatgaaagtcacagtttttggcattggttatgtagggctggtccagggcgccgtccttgctgaagtcggccacgatgtgctgtgtgtcgatattgatgcgcagcgggttgagcgtctcaaacaggggcatatcccgatctacgaaccgggcctggaggcgcttgtcagggaaaaccatggggccggccgcttgaatttcaccaccgacgccgtggctgcagtcaagcatggcgaagtgcagtttatcgcggtggggacaccgcctgatgaagacggctcggccgacttgaagtacgtgctggcggtggccgagaccattgggcagcacatgctggccccgctgaccatcatcgacaaatccaccgttcccgtgggcaccgccgacaaagtcagtgcacgggtggctgccatgctcgcgctgcgcgagcgcaccgacctggccttcgacgtggtgtccaacccggagtttctcaaggaaggctgcgcggtggcggactgcatccgtccggaccgcattgtcatcggcaccgccagccggcatgcggaggcggtgatgcgcgagctctacgcgccgttcaaccgcaaccacgaaaaaatcatcgtgatggatgtgcgcagcgccgagttgaccaaatacgctgccaattgcctgctcgccaccaagatcagcttcatgaacgagatggccaacctggccgagcgactgggggccgacatcgagatggtgcgccagggcatcgggtccgatccgcgtatcggctatcactttctgtatgcaggcgtggggtatggcgggtcgtgtttccccaaggatgtccaggccttgatccagaccgccgagaccctcgacttcgatgccacgctgctcaaggccgtggaacgacgcaatgccgaacagaaaaacagcctgttcaacaaactgtccacgcatttcaacgcgcaactggcgggcaagaccttcgcgctctgggggctcagtttcaaacccaataccgatgacatgcgcgaagcccccagccgcgtgttgatggaggccttgtggcgtgccggggcaaacgtgcaggcctttgatccggaatcgatggaagaaacccagcgtctctatggcgaccgcgaagacctgcgcctgtgcggcaccaaggaagcctgcctgaaaggcgccgatgccttgctgatcgtcacggagtggcaggtcttcaaggcaccggacttcacggtgatcaaacagcagctcaagcaaccgctgatctttgacggacgcaacctgttcgaccccgtcagtgtgcagaagaaaggtattcactacgtatccgttgggcgacctctcaacccggtataggtcttcccatgagtgtgcttaaaagaatcgtcagcggcattggcgccaattcgtttggccaggtggtaaacctgctgatccaggtggtgagtgtgccggtgctgattgccagttggggctttggcgcctacagcgaatgggtggtgctgtctgcgattccaacctacctggcgctgtctgacctgggcgtgaccacggcggcatcgagcaaggtcgtgatctggcacgagcgcggacggttgaaggtcgcgagtgcggtgtacagcaccagctttgcgtttctatccctggcgggactcagtgtgctgttgctgaccctgggcgccctggcgttgtttgacctgttcagcgtgctcaacctccagtcgatcaagagcggcgacggggtgctgattctctcggcgctgaccggctactcgctgctttgcctgtttaccaacatgatttcgatccgctaccgggccaataaggccttgccgttgtcggcattcatcatgaacgtcatccgcatgctggaatggtcggccgcgttgctgtgcgcttacctgagccacagcctggtcgccaccagcctggtgctgttggccgtgcgcgcgacgggcatcgtcagcaagaaccagatcgccaatcggttggggatcgccttgcgtttcaacctttctgcgatcggcaggcgggcatttgtgacattgatcaaaccgtcgctggcttcgctggcctttccgattggcctggcgttgaacgtgcaggggctgatcattctgttgtcggtgctgctgtctccggcgcacgcggcgatattcggtttgtaccggaccatttccagggtgttggtgcagttctcgaccgtggtgaaccaatccctgtggccggagatttcctatgcgttctctatcggtgacaaccaactggtccgcaagatgctccgctacgccttgcggttctcgctgcccatcgcctgtgtgctgggcgcgctggtggtgatattcggcgggacgatcttcgatgtgtggtcgggccgcaaagacgattattcctccagcatcatgctggtgctgatcatcggcgcgctgacccacgtggcttggcaggtgtattgggtggcaatgatggccacggcgtcctattcgtcgtttgccgtggtgttcatgttggtgtcaatcgccagcattctggcggtgttctgcctggcacaagactatggcttgctcggcgtctgctacgtgctggtggccaccgaagtcgtcctgttctgttttgccaggcgcggtttccatcatcttgaactgaggatggcccgtgctgattaatcacctgatccgccatcgattgaaaatcagcctgctgacgcctgaggggctcaagtacctggccaagcgcgtgctgttgctgggccgcttgctcaaggccgatcgccgccaacgcatgttgcgccgacagggggccagcctggctccgctggtgatgatcaatgccgtggaattcgaaggctccgtcgcgtgtttcagcgtgggcaccggcagctttatcggcaagcgcacctttatccaattgcacgccgccgtccgtgtgggcgcccatgtggcgatcaatgaaggcgtgcgtattctcacgggtacccatggcctggatgatcctgcctggcgcttgaaagtcgccccggtggtgatcggcgactacgcctgggtcgccactgacgcgatcatcctgccgggcgtgacgatcggtgaaggtgccgtcgtcggtgccggcagtgtggtcgggcgcaatgtggaaccgtacagcgtggtggcgggcaatccggcacgggtcatcaggtcgcgtgctgcgcatgcgtttacctacagcccggtccgctcaagtgccgtcgtcgaagcctggatgggtaaataagatgattctggtcgctcatcccgttggtaatcagaatgtccgcgcgttgctgcgcgcgttgaatcaacggcagttgctgcactcgttccatacctcgctggcactgcataaggagtcgttcctctgccgtctgccggtggtgggcaaggagtgcctgcggcgtacgttcgatcaggtcgatggcgcgttgctgcacagttacccgcgttatgacgtgccgcgtgtgatctgcgacaaactgaggtggtatcgcctgacacggcgcaacaccggcatcttctgcccggaaaacgtctaccaccacattgaccaggccagcgccggtttcctttacaagaccccgcgcaaacccagccaggtgtacggctatgacggcaagtgcctgggcttgttcagcgccgcccgcgacatcggcgacatcaccctcaattatgaggcggccttcggctccatcgcctacgcctgcaggatgcttgagcatgagcgcgaggccaaccctgcctggcgtgccagcattcccaatatcagcgatgacaccgtgcgcaaacagacggccgagttggccttggcggaccggatcatagtggcgagtacctttgccaagcgcaccctgggtgagcacggcgttgcgccaggcaaggttgcgatcacgccctatggcgcgccggcgccgatggtgcgtcatgaagcaagcgcccggccaggtgcacgattgaaagtgatttatgtcggcgcgctgacccagcaaaagggcatttcgtactttttcgacgcgttgaaccttgcggcgagcagcgttgccctggacgtcacggtgatcggtggcgactacgccaacggtcgcaaccccgtgctcaatgccgagctgaaaaagtaccagtggtttagctccgcgtcccacgatgacgttatccgccacttgatggaggccgatgtgctggtgctgccgtcggtcgccgaggcgtttggcctggtggtgggtgaagccttgtccacgggcacagcggtgatcgtgtcgcagaactgcggggcggccgacctggtcgtcgagggtttcaacggttatgtggtgccgatccgctctgccgaagcgatcgccagccgtctggttgagctggccgaagacaaggacaagctcagtgcgttgcagcacaacgctgtgttgtctgccggtggaaccacctgggacagctacgccagggaggtgatggatgcaatccttggccattcctgacagggtcagcctgcatgagcgctaccgcacgcgggtggtcagcgccttcgtgcttatctacctgttcatcctgttcgaagggatcttgcgcaagtgggtgatgccgagcctcagttcggtcatctatttcatcaaggacccgattgttctttatatctactggtgcgcctaccggttcgggtttttctcgaaaaacctggtgtcggcctactttgtcgtgctggtcatggtgttcttcctgctggtggcagcgtttttgttgagcagccctgaaggcttcgtcatctacggctacggcgtgcgcaactacctgctgtatttcccgttgatatttgttgctggcaagacgctcaggttgacggacgtctatcggttcgcccgtatcacgctgttcgcggcgatcccgatcagcgtgctggtggtgctgcagtattcgtccggaccccaggcgtatgtgaacaaaggcattggtgatgatgacttcatcttcatgattgccgacggtgtcgtgcgcccctacggcaccttcacgttcaccgccgggcatgtggtgtacgtgtcggcctgctttgcattcctggtcgcggcggtgtttgacaaggccttgttccgtgccgtgttcgcccggcgctacgggctgtttggcgtgtcggcggctgcggtggcggtgatgtgtttcctcacgggctcaagggccatctacgcgtacgctgcgattgtgctgctggcggcgctgatggtcgccttgatcaagaaatcgcaacgcaacctgttgtcgttgtttttcctggcggccgcgctgtttgtcagcctgctgattttcatgtccaccgacagctaccaggtgctggtggagcgcaaccgcagcgcggtggccagtgaaggctcgccggtcactcgcgcgttctccagcctgtatgcgttcacgcgtgtggttgatgacgcgccgttgtggggccacgggataggttcgggcaccaacgccgcctcgacgatcctgcgcgcagggcgggagcagggcgcaggctttttactggccgaagatgaatggtcacgcatcgtgctggaaatgggcctgcccgccgggctgatgttcattctgttccggatcttcgtgctgctctggttactgctcaagtcctacacggcgctggtcaggcaaggcaccggggtgccgttgctgctgtgcggtttcctggcgccgatcctgttcaacggggtcatgaccatgcagggcaccttcctggcgtttggcgtgctgtatgcctgcctgattctcgcggcctgcaagaaaacctgaacctactcaacgcatcagcggacgacagcacgtgaagttactaagaatcatctcttcggtcagaccggaaaaaggcggcccgatcaacgcggcccgggaaatcgacacggtgctcgcccaggagggacatcgcgtggatgtcctgacgctggatgccgagttcgcggtggactatcccggcaccgtgcacttcatggggccaagccgtttcggctacggcttgaacggcaacatccgtcaatggctggagcagcacgcccggcactatgattttttcatcatcaacggcttgtggcagtaccacgggtttgtcgcccgccaagtgctgaacaagttgggccgaccttacatcgtgtatacccacggcatgctggatccctggttcaagcacgaatacccgctcaagcatctgaagaagtggttgtactggccctggggcgaataccgggtgctgagggatgcgcggcgcgtggtgttcaccagtgaagaagagcaaatccgtgcgcgagagtcgttctggctgtatcgcgcccatgaaacgatcacggcgtatggcactgccagcccaccggccgatggggcgcgcctggcacacgacttcatcaccgaccacccggaactcaagggcaagcgggtggtgctgttcctgagtcgcatccataagaaaaagggctgtgaccacctgctgcaggcatttgcccaggtcgccgggcaagacgagcggctgcacctggtcatggccggccccgatcaaggcggctgggtacaagcattgcaggatcaggccgaaaagtcgggcatcgcccatcgcatcagctggcccggcatgttgcaaggtgcggcgaagtggggcgcgttctacgccgccgaagtgttttgcctgccttcgcaccaggaaaatttcggcgtggtggtggcggaagcgctggcgtgcggcaagcccgtgctgatcagcaacaaggtcaatatctggcgtgaaatcgacaaggatcgcgtgggctttgtcagtgacgacaccgctgacggcgccctgcacaacctgcaacgctggttgcagctggaggcgcccgcttacgcgcaaatgtccgagcgggccagggcgtgctttgccgaacgctttcatatccgtcgcggtgcgcagcgcttgctggagattgtgcgggagtgcttcccgtgattcttcaaggcaatgacccgcaccgttcggcctcgttctcattgggccatcggttgcgccgccagctctggaacatggtgtacgtggtgctgtttcgcaccagcccgcgcccgctccatgcgtggagggcctttctgctgcggctgttcggtgcgcggttgggcaaaggggtgcacgtgtatccacgggccaaggtctgggcgccctggaacctggagctgggtgaccatgtcggcattgccgatggcaccacgctgtacagcatggcgttgatccgcatcgggcgctacagcgtggtttcccagggcgcgcatttgtgcggcggctcccacgactacaacagcaagaacttccagctgtatgcaaaacccatcgtgctgggggagcacgtgtgggtgtgtgccgaggcgttcatcaccccgggcgtcagtgtggctgacggcgtggtggtgggtgcccgcgccctggtgatcaagaacatcgcgcagccgtggaccgtgcatgcagggcatccgtcccgccagatcggcctgcgtacccagcatgtgcaggagcccacgccatgaagcgcgaaaccatcagcgtgatcatcctcacctacaacgaaagcctgcacatcgcccgggccatcgactcggtgcgggccttcagcgatgaagtgctggtggtggactcattctccaccgacagcacctgcgacatcgcccgtgcccacggcgcgtgggtggtgcagcacccgttcgtcaaccaggccaagcagttccagtgggcgctggacaacctgccgatcaccggcaactggacgctgcgcctggatgccgacgagatcatcgaggctgacctcgctgccgagatcaacgcacgcttgccgacgttggccagcgatatcaccggcatcaacttcaagcgcaagcacattttcatggggcgctgggtgcggcacggcgggcgttacccgttgaggatgctgcggctgtggcgcaccgggctcgggcgcatggaagaccgctggatggacgagcacatctcggtggccgagggtcgcaccatcaccctggaaggtgggttcgccgaccataacttgcatgacttgaccttcttcacccacaagcacaaccagtacgccacccgcgaagcgattgaagtgctcaacacgcggctggggttgtttgcgatccgcgatgaactgcacacggggcagagttcgttccaggccaaggccaagcgcctgatcaagaaccgcctttataaccgcgtgccgttcaccctgagttccaccgcctatttcttgtggcgctacatcatccagctggggtttctcgatggccgcagcggcctggtctatcacctgctccagggctattggtaccgcttcctggtgggcgccaaggtgctggagctggaaaccgcaattgcccatttaaacgataaggaagccattgtccgggaactctcgaagttgaccggccataacttgaacctgcccaaacagaagtaactgaccgtttttaacaaacacccaagtttgggtgtcggccttcgctcgcctatcaatcgggagacagacatgaacaaagttgcgcttatcaccggtattaccggccaggatggctcgtacctggcggaactgctgctggaaaaaggctatacggtgcacggcctcaagcgacgttcgtcgtcgttcaatacccagcgcatcgatcatatttaccaggacccgcaggccctgcataaaaacctgatcctgcactacggcgacctggcggactcgtcgaacctgacgcgcatcatccagcagatccagcccgatgaaatctacaacctcggcgcgcaatcccatgtggcggtgagcttcgattcaccggaatacaccgccgatgtggacgccctgggcgccttgcgcatccttgaagcgatccgcctgttgggcctggaaaagaagacccgtttctaccaggcctcgacctccgagttgtatggcttggtgcaggaaaccccgcagaaggaaaccacgcccttctacccgcgctcgccctatgcggtagccaagttgtacgcctactggatcaccgtgaacttccgtgaggcctatggcctgtatgcctgcaacggcatcctgttcaaccacgagtcgccgcgccgtggggaaaccttcgtgacgcgcaagatcacccgcgccctgaccaacattgcgttgggtctggagccgtgcctgtacatgggcaacatggatgccctgcgcgactgggggcatgccaaggactatgtgcgcatgcagtggatgatgttgcagcaggacagcccgcaagatttcgtgatcgccacgggtgtgcagtattcggtgcgtgacttcattcgctggtcggcggcggagctcgggctacgcctgcgctttgtgggtgaaggcgtggaggaggtggcggtggtcgagcacatcgatggcgacctggcgccgggcattctggtgggcgatgtgattgtccgggtggacccgcgttacttccgcccggccgaggtggagacgctgctgggcgacccgtccaaggccaagcgtgtgctcggttgggtgcctgaaatcagtgcgcaggcgatgtgtgcggagatggtccgcgaagacctcaagatcgcccagcgccacgccttgttgcgcctgcacgggcatgacgcaccgattgcggtggagaactgaacatggcgcgtgatcttgatgcgcggatttttgtcgccggccatcgtggcatggtcggttcggccatcctgcggctcctgtgggcgttgggctacacgcagatactcacggcgggccgcgatgaactggacctgctcgacccggcggccgtgcaggcatacttcgccaggcaccgtatcgaccaggtgtacctggcggccgccaaggtgggtgggatttatgccaacgccacatacccggccgacttcatctaccagaacctgatgatccaggccaatgtgatccacgctgcccacagccatggcgtgcagcaactgttgttcctcggctcgtcatgcatctacccggtgcatgcgccgcaaccgatgatcgaagcggtgttgctggacggtgcactggaacccaccaacgagccctacgccgtggccaagatcgccgggatcaagctgtgcgaaagctacaaccgccagcacggccgcgattaccgcagtgtgatgccgaccaacctgtatgggccgggcgataactaccatccgcaaaacagccatgtgatcgccgccttgttacggcgcttccacgaagcgacccagcgcggcgatgacgaggtggtgatctggggcagtggccgaccgcgccgggagttcttgcacgtggacgacatggcggcggccagcgtgcatgtgatggaactcgatgcggcgcgctaccgcgaacagacccagccgatgcgctcgcacctgaacgtcggcactggcgtggattgcaccatcgccgagctggccgaggcgctggtgcgggtcaccggtttccaggggcgcctgcgtttcgacgccggcaaacccgacggcgcgccgcgcaagttgctcgatgtcagccgtatcaacgcccttggctgggaagcctacgtgccgctggaggagggcttgcgtgacgcctacaacgcctatctcgcggcgctcgaacagcctcggggccagtgatgaaagtccttttgtacggcatcaattacagcccggagctgaccggtatcggcaagtacagcggtgaacaggcgcgctggctggcggcgcaaggtcatcaggtccgcgtggtcacggcgccgccgtattacccgcagtggcaggtgggcgagggctattcgccgtggcgttttcgcaccgagctggatgccggcgtgacggtgatccgctgtccgctgtacgtcccgcgccagccgacggcgatgacgcgcctgctgcacctgataagtttttccgccagctcgtgtgtggcggtgctggggcaactgcgctggaagccggacctggtgatcctggtggtgcccacgctgttctgtgcgccccaggcgttgctgttggccaagctcactggcgcgcggtcggtgttgcatgtccaggactatgaagtggatgcgatgctcggcctgggcattggcggcggttcgctgttgcggcgcctggcgttgggtgtggagcgctggctgctgcggcgctttgatcgggtctcgacgatttccagcggcatgctccacaaggcacggggcaagggcgtgtacagccagcggttgatgttctttccgaactggtcggagaccgcacgctttcgcgatgtgccgcgcgaccgcgcgttgctgcaacgcctgggcgtgccgccgggaaccaaggtgttgttgtactccggcaacctcggcgagaagcaaggcctggagctgatcctcgatgccgcccaggcccatgcccagcgcacggagtgggtgttcctgatcgtcggccagggcaccggcaaggcgcgtctactcgaacgtgtacagcgtgatgggctgcgcaatgtgctgttcgcgccgttgcaggcctacgaggacttgccggcgctgctggcctcggccgacgtgcacctggtgatccagaagcgcggcgtggcagatgcggtgttgccgtccaagctcaccaatattctggccgtgggcggcaacgcaatcatcaccgccgaccccgataccaccctcggccgcctgtgcgaggaacatcagggcattgcggtgttgatcgagccggaatcggtcacggcactgagcacgggtatcgagcgggcactggcaatgccgacgcgtaatgaggtggcgttgaattacgccaaggagttcctcgacaaggaacgcattctgcaacgttttctggcacaggtttgatgggtatgtggcttgatttaccgaccttccaaacggtcgtggcttcgacgccgttggtggcgatcgacctggtggtgagaaacagccgtggcgaggtcttgctcggtatgcgcgtcaaccggccagcctttggtttctggttcgtgcccggtgggcgtatccgcaagaacgaaagcctcgacagcgcgttccggcgcatcaccggcgaagagctgggacgcacgtttgaacgggccaatgcacgactgctcggcgtgtacgagcatttctacgatgacagcgtgttcgccaacgccggcagcgggccggacacccactatgtggtgctcggctattgcctggacctggacgatgggcagactcttttgctgcccaccgagcagcatcagcagtaccgttggtggccacaggatgaactgcgcttcagcccgcgcgtgcatgaaaacagccgcgcctatttctgacgctctgcctcgaggatgcatttatgttgttacccgtgatcatggcaggcggttcggggtcgcgcctgtggccgctgtcgcggcaacagaaccccaagcagttcctgcgcctgaccgatgcgcacctgtcgatgctgcagcagaccatccagcgcctggagggcgccaacgtcgccttgccgcagttgatctgtaacgagcagcatcgtttcctggtggccgagcagttgcgccagctcggcatggagcaggcgagcatcctgctggagccggtggggcgcaacaccgcgccggccatcgcgctggcggcgtgcaaggcggttgccgagggcctggacccgatcctgctggtgctggccgccgaccatttgatcgaagatgtgcccgcgttccatgccagcctcgaagtggcgttgcccctggccagggctggcaagctggtgaccttcggcatcaccccgacctgcgcgcataccggctacggctacatcgagcagggtgcggcggtgggcgagggcgggtaccgggtaaggcgctttgtcgagaagccggacgctgccacggccgcgcagtatgtggcgagcggtgattacgcctggaacagcggtatgttcatgttccgcgccagccgctacctggcagaactcgaacgcttccagccggccatgctcgaagcctgccgcgtggcgctggagggcggtagccaggacctgccgttcacccgcgtgcatgcggcaaccttcgccacatgtccggacgactccatcgactacgccgtgatggaaaaaaccgatgacgcggtgatggtgccgttgcacgccggctggagcgacatcggctcgtggtcggccctgtgggaggccagtgcaaaagacgccggcggcaatgtgctgcgcggtgatgggttgctgctcgatacccgcgatagctatgtgcacgccgacagccgcctggtcgccaccgtcggggtgcacgacttgatcatcgtcgagaccaaggacgccgtgctggtggcccacaaggaccaggtgcagcaggtcaaagggatcgttgatcagctcaagcaagccgggcggcatgagcacctcaaccaccgcgaggtgtatcggccgtggggcatgtatgactcggtggacagtggcgcgcggtatcaggtcaagcgcatcaccgtgaagccgggagccaaattgtcggtgcagatgcatcaccaccgcgccgaacactggatcgtggtcagcggcacggcccgggtcaccaatggcgagcagacctacctggtcgcggaaaaccagtcgacctatatccccattggccaggtgcatgcgctggagaatccgggggtgattcctctggaattgatcgaagtgcagtcggggtcttatctgggcgaagacgacattgttcggtttgaagacaagtacggcagggcctgaagtttccgacaattaataacgttccggataacttcaaccatcggcaatgcagtgagggccgggcactttgccggtaaaacgttattttcaactaatgctcctggaagttacccgtctggtgtgctgtttagttggatggcactatcggcccggctactcactgacgataaggagtctgttatgagaaaagcactggcggttattgtgctcagtgtcatgagtaccacggtgttggccgacgagttgccgttggggctcagtacaccgctggcgggttcggtgacagtcggggaaaccctgctggtcgccagcgccattgttgccggcgtggcggctgcgtccaacagcggcggcagttccaacggcggcaccaccaccgggaccaccggtacgaccggaaccaccggcaccggcaactgatccaccacttcccgcttttcagactgcttggactccccacccaagtagtctttttttcttgtcgtttatcgcgagtgtccgagcactatgatgcgtattttttctgtggcggccgtggccgctgcattgttacagggctgcatgttcgcacccggccaatacatggacacggcggcgttgactgaaagtggcggcgcgcaaaacagtcgggtggatttgattccgatcacgccaaagttacttgccatggacgcggccagccaagtaccttattccattcccgcggaactattgagttataagccgggcccgtatttgatcggcgccaatgacgcgttgtatatcaccgtgtgggatcaccctgaactcacggcaccgtccggcccgcaacaacagatcgatgccaacggccgcttggtcagccccgagggcaacctgttctacccctacgtgggtgagttggttgccaagggccgatccattgaagcgctgcgcagtgagatcaccgacaagctgcgccaatacatcgatagcccccaggtggacgtcagcgtactgcgcttcgccagccagcgcgtggtgatcaccggcgcggtagccaaggccgggccggtgccgatcaccaccatcccgctgaacgtgatggaagccatgggcgccgccgggatcgacccgctcaatgccgacctgtccaacctcacgctcagccggggcggcaagcgctacaccctggacctggacacgctcaacttggcgcagtcgcgcttgaacgacatctacctcaaggacggcgaccagctgtacctggcctacaacgaccgcaagcgcatctatgtgatgggcgaagtcatgcagccccgcgccctgaccttcaagacccgcagcatgaacctctccgacgtgctcggctcggtgggtggggtcaatcagaacacctccaacgcggacgcgatctatgtgattcgcggcgcgcagaacatcgccaacgagccggccaaagtgttccagctggaagctgcgtccccttcggccatggccctggccacgcgctttgatgtgcagccccaggatgtggtgtttgtcggcccggcgaatatcacgcgctggaaccgcttcatcagccagttgatcccttccgccacgatcgtcggcatcggagcgtccactcagaacaacctgagcgaagccagcagccgatagggtggaacctgcgtgaacactcataaattcgctgcttacaccggcttggcgtggctgttggctggctgcaatccgctgatgaccgcctccctcgataccttcaaggcggccgtggctgggccggcgccgctggagctgacccaggcccaggtggacgcagtgccgtttgcccagatcaaagtcaccacggtgtccagcgaaggggtgatggcgctgattcgccagcgtggcgacctgcagttctgggtggcttccggcaagcaggtgctgttggtgcgtaacggcttggtggtgcgtacggtcggcctgggcgtggacctcaatggcacgcactggcaggaccagtcgccgttccagcaaggcttgcaccgtgtgccggatggctaccaaagcacgcggcagatcgatggggtggacggctatcgcatgggcatcacgctcaccagccgtatgacccgcaagggcatcgaaacggtcgagatcctcggcacgccctacgctttgttgcgggtggacgaagacgtcgaggccagcggttttcaggcgcgcaaccgttactgggtcgaccccgtcgacggctttatcgtgcagagcgaacagcacctcacgcccgacctgaccctgaccatcacccagctgcaacccactcgcaaggacgcccgatgatctgtcgaatactcacggcgctgctgctgtcctggagttgcgtcagtacgagccacgccgccgtgaccgtcagcggccaggtgcgcaccccagggcctattgcgctgccacccgatccacgtttgctggacgcgatcattccgtcgcaaccggatgcccagggttattggctgggagcggcctggttgcatcaacccttgctggaacgccaggcgcggctcaaggccggtgtgctgtttgatttgcaaaccctgcaccaggccgcgcgggctgacgcacgcgaaggccgggcccgtgttgccgaacgcttgtatcagcaggtgcaggccttgccggtcactggccgccaggtggcggtgctggacccggtggcggtggaagtcggctttgcgccgaacctgccgctcagcgatggcgaccgcctggtgtacccgccacggcccacgcaggtgcgcgtggtgggggctgtcgctgcggcgtgcagcctggcgttcgagccgctgcgggcagcccgcgattacctcaccgcgtgcccgccactggtggaggcggatgctgattatttgtgggtgatccagcctgacgggaaggtctcgcgcctgggcattgcgccctggaaccgcgaagagggcgcccccccagcgcccggcgctacgctgctggtgccgatccgcagtgacgacctgagcgcgtccacccctgacctgaatcagcaactggccgagtttctcgccacccaacccctggccgaggttacgccttgaaattatgtattgcggccgtgctgctggtgccgtgtggcgtcgcgcatggtgatccccgttacacccaaagcgatttcggcggcgtggggctgctgcagacgcctaccgcccgcatggcgcccgccggcgaactcagcgtgaacgccaaccgcaccgagccctacagccgctatagtttttctgcgcaaccactggactggctggaaggcactttccgctacaccgcgatcaccaaccgtccttatggcgccgagtcgttcagcggcggccagagttacaaggacaaggccgtcgacgccaaggtgcgcttgaaccaggaaacccactggctgccggaagtggcgctggggttcatggacctgggcggcaccgggctgttttccagtgaatacctggtggccaacaagcggtatggcgacgtggatttcagtgctggtatcgcctggggttacctgggcagccgtggtgattttggcaacccgctgggcgcgctggatgatcgattcaacgagcgtcccagcgctgaaggatccggcagtttttccaacggctatttccgtggccggcccgcgctgtttggcggtgttgcctaccagacgccctgggcgccgttgagcctcaagcttgaagtggaaggcaacgactacaaaaatgaaccacgcagcaacagctttcgccaggcttcaccggtcaacctgggcctggtctacaagctcgccgatgcggtcgacgtgagcgccgcatgggagcgaggcaataccgcgatgttcggcattaccctgcacaccaattttgtcagccgcaaggcacccgccaagacctatgacccaccggctcctccgttgccggcgaagccaccgaccacaccgccggaccaggtggattgggccgccgtgtccctgcgcctgcacgataacgccggctacaatgtgcaacgcattacccagcgtggtccggagttgctggtgtatggcgaacagcagcgctatttctacagcgccaaggcggtggggcgcgccagtcgtatcctggacaacagcgtgaatgaccagatcgactggttcaccctggtcagcgaacgctatgccatgccgatcgaggaaaccagcgtgccgcgccagacctttcgcgaggtggtcaaccagcgcgaagccttgcaggacctgcaccgccaggtcgaggtcaatcgtgccagcgagcgtacgcagaccgtgctctacacccaaacgccgaagcccctcagctatgggctgggcctgggctacaagcagaacgtcggtgggccggatggtttgctctaccagatttccgccgacctcgatgccgagtaccgcttcacccgcaacacctggtggagtggtttgctcagcgtcaatctgctgaacaactacgatgggttcacctacgacgcgcccacgggcttgccgcgggtacgcaccgacctgcgcaagtacatgaccagtgccgacgtgaccttgccgacctttcagctcaaccatgcgcagcgcctggaccaggacctgtacggcatggtctacggtggtttgctggaatcgatgtatgccggtgtgggcagtgaagtgctgtaccggccgatgggtcagggctgggcggtgggtgccgatgtgaactatgtgcgtcagcgcggtttcgagcaggatttcagcctgcgcgactatcgcacggtgaccgggcatatcaccgggtataccgacctgccattcaacctgcagggggccttgagtgtcggtcgctacctggctcgggactggggtgcaacgctggatctttcgcgggagttcaacaatggcgtgcggattggtgcgtggatcactcgcaccaacgtgtccaagcaagagtttggcgaaggcagcttcgacaagggcctctacctgtccattccgtttgatgagttgatgagcctgtcgacgatgcgccgcgccaacctggtgtgggcaccgctgacccgcgatggcggcgcgcgcctgaatcgcgcgtattcgctgcattcgatgaccgatgggcgcgacagtgcattgttctacaagaatatcgacaagatcactgagtaaggccagtaggatcgggggttagtagatgtccttggacagcagcgtaaacggtgtcttcagcaggatcttgatatccagccacaacgaccaggtgttgatgtagcgcaggtcgatgtcgacgcgtttttgcatcttctccagagtctcggtctcaccccggcatccattgatctgcgccagcccggtgatgccgggcttgatgcgatggcgcgccatgtacgcgtgaatcttgcccgagtaatagtcgttgtgtgcgatggcgtgggggcgtggaccgaccagggccatatggccttgcagcacgttgaacaattgcggcaattcatcgatagaggtgcggcggataaaccggccgaccggcgtgatgcgcgaatcattgcggctggcctggcgtacctcgtggtcgtcatgcacgcgcatcgagcggaacttccacaccttgatcacctggccattccagccatgacggtcctgcttgaaaatcaccgggccgggggaggtgagcttgatcagcagggcaaacaccaggagcaccgggctcagcaccaggatggccaacagcgcgatgctcttgtccagcaacgctttgctcagggcggcggtggggcggctggtcagcgggctttcattgaggaagatcgctggcagcccatccacttcggcgacgcaatggttgagcagcagcatgttgttgaggtcgggcacccagatcacatccacgctgatctccagcaggttgaggtacaacgcctcgatgtgggtggcgtcctgcaacgagtgggtgatgtacaggcggcgaatgccatgctggcggatcagttgcggcaattgcggcagctcgccaaggatctgcgcctgtgcatccggagcggcctcggcatggctgccgacgagccccaccaacggcgagcgcttttggcgagacagagtgttcgccaggtcaacggcaagtttgccggtgcccactatcagtgacttatgccgttggtgaagttggcgatggtaataccgggacaggctgtgcagcgggatataacacagggccagcagagggtaactaaccgccgcccagagcaacaagatgtccaatggaaacaatgcggtggcattgcaggcgatacccaccgcgaacacgattaaagcggtgagtaaccagcccatgaacagtcgtcccaagcccacgccatagtcatctttcttgctgtagacatcacacagactgtacgccggtaatgaagccagtatggtaaacgccgcgagcacacggtagttgtactcaagttggccggtcttgaacacgaccaacataaataacagtgcaacgaccaaacccgaggcaagcatccactgaccccagaacgtcaaccccttgggggtcaggttgcgatgcattctagtgttattcagcatagttctgctcccggtggtgaccacgcaggtggtggcagggtctaatcacgcggtggaatacccgcactaaaagataggcacgcgcagtcgcgtacccacggatagtaatgaacggcaggaggcattggctgacgacttataacaaggtcagcggcgtcttagtgtgagagtgttataaatgggcaggtaaaagtgtgtattaataggcagggtgggtatcaaagtatccgttcttgttttttttgttttagcggcgtgacggggtgagttccagtggtttcttgattttttgtgtaaggcaataaccacggtttctgaccgcacgaaacaaacgttcgccgtcgttggcacgcttgaacttttcctgcagccggctcaggcacatttccaacccgcgatatagatcaggttcgcgtccgatattacggatcagttcctctttgctgacaacacgctcttcatggtgcagcatctttttaatcaacgccgattcaatggttgtcagtgaaatacgtaagccgcctttgaccagggtgcggtcatgctgtgtcagtagccagaaatcctgaggataaagttgagttcgctcagggtttatctccgtaggccgagtggggttattgggcgtgctgtcgtgatccgttggcatggggagtctggattcttgtcgcacagagttaaaagagtgtgagggtaagccaagtgtgtgggtaatgacataggttgtcaggcgtcggttgtcgtcggagttggagtgtagagggttgtttgcacggattttagggtctgtttctgttggcgcgaatgtattcaagtcgtaatgaaacaattcggcattgggcgtaaagtctcgcagtgcgatggccgcaagtgtgggggtgaaggcgtgtttcttgagggagctcatagtgtccaccgttagtatgaaagtgcggtttttataagcaatcggcaggggagtagtaaccgccctgaaagtattcgaacggcaggtttttagccagcatggcactgtcggcaaattccacggtgtcggcgatgaagcgcacccgggttgcactgatcagctcaagcatgcggtcgtaaagccgatcgaacagaccggaacgcgtattcaggctcagccgcagggcggagtccgggaaaggcattttcacgtagtcgtaaagcttgaggtcgatcagcaggtctgccggttttgtatcgagtctgtaattgttgtaggccagggtgacagcgcactggtcttttaacttatataactgacgcaccatcgctcggcgctcgacagggccgggcagggcatccagaggattggtaatactgagcgtaaagggctgtctgcgtttttccagtgactgggcggtctgaacaatgctcttgtggagatcttcgttcatcaaggcggcttgatcgatccgcaggaacttgcggctgacaacggaattgcaggctttatgtggtgcgctgatacgttgcagcgccttgtggtaggcactgtcgggtagttcgtgagcctgcagtgagccaacgctgacttcgttgccccaaagtgcatggctgcgatcaacgatggcttgcctggcaagcctgaagtccacagcatcggcaggggctaccttttcgctattcacggtgggatcgttccttggcggtttgaaaatggctggcacatataactccccggcttagtttgtaaccataaccacggatattctgaataatgttgtcaccgtagtgcgccttgattttactgcgcagtcggctgatggacttttccagggcgcgggagtcgtagtacttggtattaaggcccatgacttcggcgatttcattgtgactgagcagtcggcgctgtataagcgcgtccagaactttcatttcgacgaaggatatttcaagtttcttgccattaccataaaggcacatgcgatcctgatcgagcaccaggccacaacgattcagtcgttcaccttcactgagaaaagcatcaaacaggcttaactttttttcaggggacgcctctgccactttgatgcagtaatccgcgccggccagatagtatttggtcttgctcaaactggaggcgaatgtgacgacgacaaatatggtgcagttgggatggctgtttcgggtttttcttattatatccagggtttgattgcttgccgcgggggtgtcgatttctatgatgatagcgcggtagcttgcatggctttcctgggtgtcaacaagttgttcgtagtaacgtgtatcgactttcaaatcatccgctacagtgcgaactataagctcccgaaaatcctccgatttagattgagtccgtgcaatagcgaggacgttggaaaaatgcatcacctactcccttttccggcatgcaaggccgtcagttcaatcgctgctagcgtttagatactaatcgaattgaatacggtaaaacgtgacaaattttaacattcgccactttgtttttcagaaaggaatggggtagtgcgcggttattgcgagggtttttgcacgggcgtacacatatgctagtgcaaactcttaatgtgcgataagtattttagcccaaacggtttttttgctgaatcggggaaacccttgcatcgctaaggagggaaggcagaggtgcgcgccacgcgcctgcattcaaatctgctcctccccccgcaattgcacactcatgtcatcgcagtttttcgcccagtcgctgagccattgcggcatcggtggcgaggtctcatccaggcccagttccttcacaaagtcgcccgggggcagggtgcccttggctgaacggaacagcccgcgcatcaccaccacgccgaccacccggccgttgctcacgaagcggtgctccatcaggctccacttgtggtcccagccgagcatgcgtgtgtgtacctcaaacacttcgaacagcttcagctcgcgacggaatttgccccaggtatcgccgacgatcggcagcgccttgttgcgcaatgccacgcgaaaggccccggtgcgcaatacgaaatccatccgggcaacgtccgccagggaaaagtaccggccattggtgacgtgtcggttgatgtccaggtccagcggccacacgcgcatgcgcaccaccgtggtgtccaggccatgcacaggtttgcgccaggggcgccgggacagcatgaagagcaagcgaaaccacagattcatccaaagcacctgacagttgttcaaaggcagcactgtaggggcgtggaatccgctaaggtagatgcacaaatgacttattacatgcgaaaaacgcaatcgggcttttatcatgcatatcaccttgcttctggctgatcgctgctccgccgccagcgccaccacggccctggagatgctcagcgccgccaacctgtttgccgactcaccgcctttcgaagtcgcagtggcttccctggacggtcacgccgtggtggcctggggtggtcaacgcctgcaggttgatcacgcgctggcgcagatcgtgcggactgacctggtgttgatcccgggctttctgttcacgctgaaggaggccctaccgacctttcctgcgtacgcgccctggctgcgcaaacagcacgcacgtggtgcggtactggcttcgatgtgcaccgcagcttttctattggctgaatccggcgtactccagggcctgcgcgccacgacccactgggcgtttgccgagttgttccggcgccgctacaccgacgtgagcctggaggacgcgcagctcctctgcgaagagaaccgtgtgatcaccagcggcggggcgactgcagcgatggacttgatgctgcacctgatccgccggttcggctcgccggaactggcccatacctgtggccgatacctgctgatcgataacgtgcgcagcgaacaatcggtgtatgccatgtggtcactgcccaaaagccatggcgacggtgaggtcctgcgggtacagcactggctggaacaacactttgccgaacccttggtgattgacgaggtggcccggcaattcggttttggcgtgcgcaatttcaagcggcgcttcaaggaggctaccggcttcacgcccattgcctacctgcagaccctgcgtctggaacgggccaagcaaatgctggagtcgacccgcatgaccctggaaagcatcacctacgcggtgggctacgaagacagcaattcattccgtcgcctgttccagcaacgggtaggtgtgttgccggcggcgtatcgcaagaagttcctggtccggccggcttgactcaggggcgcggcaacagatcggcaaggcgttgctgtagatcgaccgtgacctgcatgaattacaggcgaaaaaaaaccggctgatcaggccggtttggggttcccgcaaacagcgcgggattatgcgttgttgccttgcaggcgatcagcaccgccttcggccaggccacgttcctgcaagcggtcagcaccgccttcggccaggccacgttcctgcaagcggtcagcaccgccttcggccaggccacgttcctgcaaacggtcggcgccaccttcggctacgcggttaccttgcagacggtcagcaccaccttcagcgacacggcgttccagcaggcggtccgaaccaccttcggcaacacggttgtcttgcaggcggtctgcaccaccctcggcgacgcggctttcgatcaggcgatccgaaccgccttcagccacaaccgggtgggcaaaagcattggcagcgagtaccgagaaagcgaggctaagcaagatttggcgtttcatgattgtgtgctccgagtgttttgatttaagtgttgccgggtatgggtttgatgttacgcgttgcattttttaagagaacttcattgggctgatggtgactatcgacgccagcgatggctcgtgtgggcgagccatcgcagggccggtcatggcatctgcggcagttcctgggggcgcaggtcgaacaccagcacctcggcgtcctcgccctggctcaggcggatctgccgctcatcccgcacccgggcgccgtcgccttcctgcaagcgctggccgttgatttcaacactgccccgggccacatggaggtacacatggcgatcgggcggcaggtccagggtcgcggtttcatcgccgttgaacagcccggcatacacccgtgcgtcctggcgcacgctgagggagccatcggcaccgtccggcgagatgatcaactgcaggcgcccacgtttctgggcctcgctgaagtgttcctgctggtagcgcggttcggcaccggccacggcaggcacgatccagatttgcaggaagtgcacgccacgggtctggctgtggttgaactcgctgtgggccacgccgctgccggcgctcatcagttgcacatcgccggggcggatcaccgagccggtgcccagggtgtccttgtgttccagggcgccttcgagcacataagagaagatctccatgtcgcggtgcgggtgctggccgaagcctttgccggcggcgacacggtcatcgttgatcaccaacaggtcggaaaaccctgttcttgcgggttccagtagttggcgaacgagaaggtgtggaacgacttcaaccaaccgtgattggcggcgccgcgttcggaagctttgcgaagggtcagcatggtcttgtcctcaagtgggagcgggctgcggtatgcagggctccggcgttgagaagaaggttaatggttactgggttattcattaagaagatgaaaactgaataactgtctcgttcaggttgacagtttcgagcgtgtcataatgcccgccgtattccttcccgatggaccttacctgctatgaaaaccgtggccatggcgctgtttccggacttcctgctgctcgatatggccgggccgctcgaggtgttttccattgccaaccgctacctgccggcggcggcgcattaccagatcctcacccttggcaccgagcccggtccgttgcgcgcctccaatggggtagcggtgcagacggacctgctgctggaccaggcccaggacgcctacgatctgctgctggtgcccggtggccccggtgcctataacgaatgtcacccggcactgctgccgtggctgagggccgcggccccacgggcgcggcgcttcggttcgatctgcaccggggcctttgtgctggggcatgccgggctgctggacggtcaccgcgtgaccacgcactggcactacaccgagcgactgatcaaggcgttccccaaggcgagggtcgaaacggatcgcatctacctgcaggacggacgcttgatcacctcgggcggcgtcaccgccggcatcgacctggcgctgtcggtggtggcccaggaccatggcaagcaagtcgccgtggacgtggccaaggtgttgctggtggtgatgaaacgccagggcggccaggcccagttcagcccgatgacggcggcggtggcaccgcaggaaaccacgattacccgggtgcagaaccatgtgctggcgcatctggaccaaccgttcaccatcgagtccatggctgagttggccggcatgagcgcccgccattttgcgcggctgttcgccaaggaagtgcagatgacgcccatggtcttcctgcaaggcgcgcgcatcgaccgcgcccggcagttgctggagaccaccgacctgccgctcaagaccgtggcttttcacgcaggcttcggcagcgtgcggcacatgcgctttctgttcagtgaaaaactgggcctcaacccgacccaataccgacagcagttcagttaacgacagaatgtccgtctcgcgcacccgaatgtccgtgtcgctccctgtgccagcattgtcctgtcacgggtagctggcaagatagcgtcaagcccacggaaaaggatgcgcaaacgcccaaggccgggtgtttcagcgctattgcacatatgaacaatcctcaggcgattgacgctgatggcacggttcgcttcggcgcctatgtgtttcaccggcagcagcggctggtcagcaagtcgggttggccggtgcctgtgggcgggcgtgcactggatatcctcacggtgctgctcgaagcgcccgggcagttcatcagcaaagccaccctgatcgagcgagtctggccgaacagcgtagtggaagaaaacaacctgagggtgcatatcgctgcactgcgccgtgtgctcgatgggcaacagttcattctgaatgaccctctgcgtggttactgtttcgcggcccgcgtacacggtgcgatgccggccgcgctgccacggcacaacctggcgatgcggctcagtgcagtgatcggccgtgacgaggtgttgggcgtgctggttcggcgtctgtccgggcaacacctgatgacgcttaccggatgcgccggtgtcggcaagagcaccctggccctggcattggccgagcgcgtgttgccgcgctaccgggacggcgtgtggtgggttgacctggctaccgtcgaggcgccgctgaccatgttgcgccacttggctgcggcgctgcacctggagccctgcagccacgccagcgaactgtgccgtcaattggtctcgcgccagctgttgctggtgctcgacggtgctgacctgctgctcggcgcctgccggcatctggtgcgtgtgctgcacgacaccgcgcctcaggtcagtgtgctggtgaccagccgcgaaagcctgcaagtccccggtgaatgggtgcaacgcgtgcccaggctggcgatcccagggccgactgcccagggcagtgtcgaacaggcgatggcttacccggcggtgcagttatttgttgcgcgggtgcgtgccagccagcaagggttcgcgctgcgcctgcatgacctggcgccgctgcgggacatctgtcggcgtctggacggtatcccgctggcattggaattggccgccgcccaagtcgatgccctgggcgtgcgcggtttgcagcagcagttgcgcgcaggcttgcaggtgctgacccgaggccggcgcaccgcggtggaacgccaccaatccctgacggcggccctggactggacctaccagcgcctgagcctgccggagcgctggctattcctgcaattggggttgttcaaaatggccgtgaccttgcccacgttgagtgaactggtcgccggtaccgagttggaacacgccgacctgtgctacctgctggggcgcctggttggcacgtcgctgctgactgttgaccccggccctggagacccgcgttaccgcctgctcaattgcgtgcgcagctacgccctggcgcaactgcgcgacccgttgcaggtggcgcgtttgcagcagggctatgggcattacctggggccgttttcaggccggccgtttgtcctgcaactcgtcgagcaggctgcgtacgcggactaggtcctgggtggcaaagccttcggtgaagcgggcgtagatcgaactcagcaagtcgcgcgccgcctgtatgcggccttgcgtctgccacaggcttgccaacgaggttgcacagcgtaattcccaggccagcgcgccttgctggtgcgccaggcccagggcttccagcagcagggcttctgccgcacggctatcggccaggctttcggcgcgcactcgcaggatttccggggtgcaccagccggccgcgccactgctggcgcgctcgaaggccgcgtcactgacctcgattgcattgaaggtcaccaggatatcctcgaccaggcccaacccctgcacatccgcgatgggcagcgtgccctcataacaacgcgcccaggtgtgaaacaactgcaccgagtgcttttgcgcctgttgcagcagctggtcctgatgttcgtgggccatgccgctgtcgccgttatagcgagcgatgaccaccccggccagggccagggtgtagcagatcgacgtgccatggttgatctgcaaggccagcgccagtgcctggcttgcggtacgccatgcgcgctccggataaccgcgcagccacaagatgcgcgcaaggatggtcagggaggcgacgctctggtcgtactgcacgccaaagccatgggtaaagcggttgagatggccgctctgggccatgcgctggatcacttgttcggcattgtgctgcgcgagggcctggtgaccggcgaagtgctgcgccaacacccgcaggcgctgggcactgagggccagcaacggctcggcctgcgggccgagctggtcgaagtgcaggctctgcgccaaggcctcacggtagttgccgcagcacaggttcaccgccatatgccccgacaccgcacgcagctggccggccaggtccttgccggcttccgccaggcgccgcgcgcaactgaacgcttcaatggtctgcggcgtgccgccctgggtgtgataggagaaactgcccagggccagttgcaaggccatgttcaagcgctggctcggcgcattcgattgcccgagtcgtgccagggccttgcccacgtacaagccgtgttcgcgcagcagcgacagctcctgccacaacggcatcgcactcaccgtcaggcgaatgcccagcaggtgcgcaccctggtcgcccaggccccagtcgagggcggcgcggatgtcttcgcgcagcggcgcatagcggtcgatccaggtctgggtcgcgatcagttcccaatcgtcctgcgcctggttcatcagcgccaggcagcgctcggcgtggtgctggcgggtggcgtcgagttcctgggcgacgctgagtttttccagggcataggtgcgggtgatgtccagcaggcggtagaccatctcgtcatcgccggcttccacattgagcaaggacttggcgaccagctgagtgatcgaattcagcacctcgtgcggtgcaatctgctccccggcaatcaccgccgccgcgctggccaggctgaacccgccgcgaaataccgccaggcgacgcaggcagatctgttcgcaggcggtcagcagcgcaaagctccagtccagggtcgcgcgcagggtctgatggcggggcagggcgcttcgccggcctcgggttagcaggcggaagttgtcttccatctgcaccagcagtccgggcaggccgaagcgttcgatctgcgccgccacgagttcgatggccaggggaataccgtccaggcgctggcagatatcaatcgccagcggcagctcggcctcgctcagttcaaagctgtcctgatgggacatggcccgctcgatcaacaattgcagggccgggtagcccagcgcctgggcacggttgccggtggcgggtgggcaggccaggggctccaggcgctgcacgtattcgccctcggcgcgcaaggcctcgcggctggtggccaggatgtgcaagcggggcgcgtggcgcagcagggtttcgctgatcagggcgatgtcgtcgagcacgtgctcgcaattgtcgatcaccagcagcaactggtgctcctgcaagcgccgcgcaaacgtgggcagggcttcgtgctcggcgtgggtgaggtcgagcagggcggcgaggttgggcaggatcatcgacggcgcgctcagtggcgccaggtccagcaagcggatgccgtcgcggtagtgcccgatcagcaattccgcgacccgcagggccaccgtggtcttgccgatgccgccggcgccggtcagggtgataaagcgttgctcgggcagttgctgtaccaggctgtcgatcagggcctggcggccgagcatgcgggtacggcgcagcggcagattgtggcacgggcgttgggcagcaccttcggttggcagggtcatcggctcgatgctcagtggcgcaacaaaactgtagccacgctgggccacggtcacgatatagcgctgcccggcctggccatcgcccaatgccttgcgcaacgccgccatatgcacccgcaggttgccgtcttccaccacgctcctgggccagacgcgggcgatcagctcctgcttgctcaccacattgccggcctgctccagcaggatcagcaggatatccaccgcacgccgccccaggcgcaatgggcgacccgcctccagcaccaggcgctggcgcgggtggatgcggtaggggccgaagtgcacggcctggtcgctgaggtcgttcatgggtggccatgctcggaacggggtgagcggccagcataggccaggcaggccaggaccactaggccgcgatcacttgcggtttagagcgagagtggtgatttcgccaggtcatcgggttgacgccttcgctgcgggtgaacatatgacagaagtgcgcctggtcgcagaagccgcattccaggctgatttgcgtcaggctcaaggatgactgggcgatcagctccttggcccgctggatgcgctgttggcggatccattcctgcggcgacagcccggtggtgcacttgaacgcacgggaaaaatggctgcgcgacagcgcgcaggcctgggcgaggtcggcaatggccaggctttcgccgaggttggccaggatcagctgtttggcgatgcgctcgcgccgtgggcacaggccaccggtggcggacacgcgaggggcgtattgatcgagtcgggccatgacaaatatccgcagtcgatgggagcgttcccggtggatggatgcagtgtagacgtggccaatcttgttgccggaccgtccggctgacgagttaatcgttgttaatttcgccaggtgccgaccaggaaaagacagcacaggcgtgcaatgtggccggcgccttgcgtgtttatctgtgagcttgccaaccgtgtggatatcaccatgaatcgcaacgacctgcgccgcgtcgacatgaacctgctggtgattttcgaggcgttgatgttcgagaagaacctgacccgggtcgccgaaaaactcttcatgggccaaccggcggtgagtgcggcattgggacgtttgcgcgatctgttcgacgacccgttgctgctgcgcaacggccggggcatggagcccacgccacgcgccgtggcgatactcaaggagttgcaaccggccatggacaccatttccggcgcggtcagccgcgcgaaggatttcgacccttccagcagttgtgcggtgtttcgcattggcctttcagacgatgccgaattcggtctgtttccgccgttgctcagtcaactgcgcgaagaggcgccgggcattgtcgtggtggtgcgtcgggccaactatctgttgatgtcgtcattgctggccagcggcgagatttcggtgggggtgagctacaccacggaattgccggcgaatgccaagcgcaagaagctgcgggatattccgtgcaaggtcttgcgtggggatggcggtgttgaaccgctgaccctcgacgactactgcgaacggccccatgcgatggtgtcgttttcgggggacttgagcggcaacatcgacctggacctggcacgcattggtcgtacgcgccgggtggtgttggcggtgccgcagttcagtgggttgcgggcgttgctcgccggtacgcagattattgcgacggtgccggattatgcggcgtgtgcgttgacggaggggacgtcgctacgggcgcaggacccgccgtttgcgattgatgcggcggagttgtcgatggtgtggagtggggtgcatgacaatgatccggcggagcggtggttgagggggaggattggggagcatatggctcgggtggtttgactgggtacatatccgttgcttcggtaacggctacttatggttccggtccgtacagaagagcgcaaaaagtaaccaaaaacgcttcgccccaacactcggcacctcgcctaggctcggtgttccctcactccggccagcgtgtttgacggggcgccccagatcaaaagcaagagcgcggcggccttagagccgaccggattgaatggccggtactcggtcaaagtgtgggagggggcttgcccccgatggcagtgggtcagtcactgatgagttggctgacacaccgccatcgggggcaa

SEQ ID NO: 39 - DNA, 117565 bp, Pseudomonas nodulensis
ccccgatggcagtgggtcagtcactgatgagttggctgacacaccgccatcgggggcaagccccctcccacagtttgatcttcatgtatcagttgaagggtggtttgctctggctctggtttttgatcttaggcggccccccaaatcactgtcggattacgggcacaccgagcctaagcgaggtgccgagtgttggggcaagagcgctttggttactttcgcgcttttcgaaagtgacccgccgtaagggcggaaccataagccgccgttaccgaaataacggatatgtactcaaccccagcacccaaaaattggtcacccattcttacccaaaattggctattcctcccccaaggcccgatgactaacctagccatcaatccccaccgccctggagcatcaccatgcaaccccgtaccgatttctacaccgcctccccagacgccatgaaagccatgctcgccctggaagccgccgtcggcaaactgtccatcgaactaccgttgctggaactgatacgcctgcgcgtctcgcagatcaacggctgtgccttctgcctcgacatgcacaccgccgacgcccgcaaaggcggcgagaccgaacgccgcctgtacaccgtgtcggcctggcgtgaaacgccgttcttcaccccgcgtgaacgcgccgcgctggcctgggccgaaagcctgaccctgatcagccatacccacgcaccggatgaagacttcaacgcactggccgccgagttcagcccccaggaacaggtcgacctgagtgtggccatcgccaccatcaacagctggaaccgcctggccgtgggttttcgcaagatgcctaagtaagcctcagaagttgaccgaggcactcaggcgcgccgtcaatggcgcgccctggaacaggtagtcatcgcccatgtactcgcccgcgtcgcgccagtagcgcttgtcgaacaggttgtcgacgctcaggcggaacaccgtctcatagccgtccacttgggtggtatagcggctgcccacattcaccaccgcgtagtcccccacttccacattgccgctgcggttggcgtacttcttggcgctgtattgcactccgcccaataccgccaggccgttcacccacggcaacgcataatcggcatacacactggcgcgcaacttgggcacgttgatcgcctggtggccttcgtagtccggcgtgccgctgccggtcacccgtgcgcgaatcgccgccacgctggttgcgatctgcaggcgttcggtggcccagccgttggccgacaattccagcccggtgttcttttgctcgccctgttgcacgtagtcgaatttaccggtgccatccggcttggcgtactggtaggcctggcgggtctggaatacagcggcggcgaagctgatgcggcgccagtcgtatttcaccccagcttcgatttggcgtgaggtggtcggggcgagcgtttcgtcggtgttgttggcgaaccacggcgcggtgccgcccagggacaggcctttgctgtagctggtatagagcgagatgttctcgacaggtttgtagatcaacgaggcctggggcaggaacacgtactgctgggtatgacgggcctggttgccggtgacgctgtcgaaggccttttcatccaggcgcacttcacgaccgccgaggatggtttgccattgctcgttgaaacggatgcggtctgtaacgaacaggccgtactgacggctgtcgaggttgcggtggctgtcgttcaacggcttgtcagtcggggtaaacgtaggggcgtccacgtcgatgttggtggtgccgatgtattcattgacggatttgcgcttgtcgatcacccggcggaacgcactggtgccaaaggtcagttcatggcccaggccggcggtgtcgaacagcccggtcatggccgcctgcacttcgtcgtcacggcgggtgtcgtcagggctgcggtagtcgtagacgtcgtagttgccttcggggctgaagtagtttggcacgctcgaggtgcaactggtcgagccatagcagccccaggcaaacgagctgtaatcgtcgatcaccaccttgctgcgcgccgcactcacgctgcctttccactggtcgttgaaacggtattcaaacttgccgttgaggttcagcgaatcaatgcccacctgcctggacccactctgatgccccagcagtttcttcggcgaggcaccgtgtggcacctcggtgccgcccagcaactggtagcccggtaccgagcgttgctgcttgttctggtattcggcatccagttgcaacacggcgtcggggctgatgttccagtcgaaggccagggacataaaatcgcgctggccgttggcgtgttccacgtacgcgttgaggtcctcgtgggccacgttggcgcgcaggccgaattgttgctcgctgccgaaccagccgccgacgtcggtggcgatataaccgctgccacgatcgtcggtggagatggtcaccgagcgcacgtcttccgggcgcttggtcacgtagttgatcacgccgctcggctcggagatgccactttgcaggccggccaggcccttgagcacttcgacctgctgcttgttctccagcgcgacgttctgctcgccggtgatggtgcgcccgttgatcttgtagctgctcgccgcattcagcgaaaagccgcgcaccacgaagttctcgtagtagccgatgggcgcatagctgtcgcccaccgaggcgtcgttgcgcagcacttcactgagcaggcgcgcttgctggtccttgatcagtgcggcgttgatcaccgtgatcgaggccggggtgtcgagcagcggtgcctcatcgaagccgcccaccgaagcggtttcgctgcggtagccggattcatcctggccctggaccttcacttccggcagttcaaggtcagccgccaggctgtgaccgatgccgccgctgagcagcaaaccgagggcgaaacgtgaggtgacgacgggacgaaaacgcaaaaccatgggggcagggccttaaagcgcgggcggggggcgcataagctaggcataagtgcgcagttttacaagttcgcgagaatgattcgcggcttgagacatcccgtctcacaccacacgccaatccatccgcgtctcgacagcccgccgggcacctgcgatagacaaggcttccctcatcaattgcaggagaacgccatgagtattgctggaaaagtcgcgctggtgaccggcgccgggcagggcattggccgggccattgccctgcgcctggcacaggacggtgccgatatcgcgctggtggacatcaatggcgccaagcttgaagccgtggccgccgaagtcgtcgcgctgggccgcaaggcctcggtgttcgtcgctgacgtgtccaagcgcgaacaggtggcggcggcggtggagcatgcgcaccagaccctgggtagtttcgacatcatcgtcaacaacgccggggtggcgcagatcgattcgctgttggacgtcagcccggaacaggtcgagcgcaccctgggcatcaacgtgcagggcgtgttgtggggcatccaggccgccggcaagaaattcaaggcgctcaagcagaagggcaagatcatcaacgcctgctccatcgccggccatgaaggttttgcgcttctgggagtgtactcggccaccaagtttgccgtgcgtgccttgacgcaggcggcggccaaggaactggcgagcgccgggattaccgtcaatgcctactgtccgggtgtggtgggcaccgatatgtgggtcgagatcgacaagcgcatggccgagatcaccggtgccgaagtcggtgcgacctacaagaaatacgtggatggcatcgccttgggccgggcgcagacgccggaggatgtggcggggctggtcgcgtacctggccgggccggatgcggactacatgaccgggcaatcgccgctgatcgacgggggccttgtctaccgctgacatctcagatgtacccagtccaatgtgggagggggcttgcccccgatagcagtgtgtcagccactggaagtattagctggtccaccgccatcgggggcaagccccctcccacagtgttgaccccgttgtatcagcgggttttgttcggcatgtcgatgcccagttggttgacgcggcggtacagggtcgcccttgagatccccagcgcctgcgcggtcggtatcggcttccagcgatgccgaatcagcgcatccagcaccacctggcgctccgggctcgcacgatcttccgtcaatgcttcaacctgttccccacgcacctccaccggcaaatccgccacctgcaccgtaccgccctcacacaccgcacaggcatacgccagcacatgccgcagttgccgcacattgcccggccacgcgtaccccaacagcaactccagcgcagcctggccgattcccaccgtgatgccgttgttgcgcgcttcctgttccagcaagcggttgatcagcgccagtttgtcagtgcgttcgcgcaacggcggcaggcagaagcgcgcgcagccgaggcgaaagtacaggtcctcgcgaaagctgccctcactgaccaacaccgacaaatcgcggtggctggcgcagatcacctggatatcgacggtgcgggttttcgcggcgcccagcggcgccacttcaccttcggccatcacccgcagcaggcgcgtctgcaaggccaggggcatgtcgccgatttcatcgaggaacacggtgccgccatcggcctgcaccagcaaccccggcatgcctttgctggcggcgccggtgaaggcgccagccacatagccgaacagctcgctctcaatcaggttttccggaatcgccgcgcagttcaccgccacgaacggcccactgcgtcgggcgctgcgttcgtgcaactggcgggcgaagacttccttgccggcgccggtttcgccttgcaccagtaccggcaggttgcggtccttgacccgcacggccaggcgcaggtgttcctccacacgggcatccaccaagggcaccatgggcgcccgcgccggtttgcgtcgcggcgcgttgacccgcacgtgcagcgcacccggttctcccagccactgcagttgctgggtggactggtcggtgacggcgcgcaaggcgttcaggtcgaacacctcaccgatatgtgccggcacctggccaaagcgccggcgcaaggcctggcgcgccttgctgttcaaggcccgcagacggccgtcctggtcccaggccagcagcaggtcgggctggctgtccacataacccggcgtgctgtgcgcttgcaacacccagtgctggcgggcgctgtgcatgaagaaggcgttctcgatggcctcggcactttgcgccaccaactggcgtatcaggtgctggctgcggcggtcatctggcgatttgagcgccgaggcatccatcactcccagcaggttgccctgggggtcgaagatcggcgcggcggagcaggtcaggccgatgaaggctgcacgaaagtggtcgcgcttgtgcaccgtcaccgccgattgactggtgagcacggtggccacgccgcaagtgccttcttcggcttccgaccagcaggtgccgaggtacaggccggccttgcggcagtcgctgcggatcgaggtgtccacgcggtggtcgatggtctggccctgggcatcggtgagcatcacgcagtagtcggcctggcgcacacggtgatgcagttgcccgacggcttcgccggcaatgcgcatgaacagttcggcgcgttcgcggcattccttgagcaagggttcgctgaggatgcgtggcccctgcagggagccggggtccaggtggtgttgctccatggagcgccgccatgaatcgaagatcagcgacggcaccggcgcctggggcagacgatcagcattgcggaccacgcgactgacgcagtcgacgtgctccctggagttcgcggcgagcataaggcctccggttctcgatctttgttgttatacccgccattaagcgcgcatgcgtcgggtgggacaagcgcggcctgaccaactgcccggtatgagacgcagcgtctcaaaccggctgagacgccgccttcgagttgcaatgccgcgtctcattctgcgacgccggcctgcttgcgacaaccgctctggatcaaggttatgccaggttttttacggccttggcacaggctgtgctgaaggccttgtagctgaccacgatcagccttttgtgtgccgagacaacctggagaacaacaagatgtccactcacctgtccaccgatcaactgctgcatgcctataccgtgatgcgcaccatccgtgatttcgaagaacgcctgcacgtggaattcgccaccggcgagatccccggtttcgtgcacctctacgccggtcaggaagccagtgccgccggagtcatggcccacctcaacgatgaagactgcatcgcctccaaccaccgtggccacggccattgcatcgccaagggcgtggatgtgttcggcatgatggccgagatctacggcaagaaaaccggtgtgtgtggcggtaaaggcggctccatgcacatcgccgaccaggagaagggcatgctcggcgccaacggtattgtcggcgcgggtgcgccgttggccgccggtgcggcgctggcggccagactcaagggtagccagggcgtggccgtggcgttctttggcgatggcggctccaacgagggcgcggtgttcgaggcgatgaacctggcctcgatcatgaaactgccgtgcctgttcgtcgcggaaaacaacggctatgccgaggccaccgggtctggttggtcggtggcgtgcaaggacatcgccgagcgtgccgtggggtttggcatgccggggatgatcgtcgatggcaatgatttcttcgccgtgtacgcggcgcttggtgttgccgtggagcgtgcgcgcaagggcgacgggccaaccttggtcgaagtgaaattgagccgcttctacggccatttcgaaggcgatgcacaaacctatcgtggccccgatgaagtgaaaaacctgcgggaaaacgccgactgcctggcgctgttccgccagcgttgcagcgccgaaggctggctggacgcggcgcaattcgagcgcatcgatggcgaggtcgcacagcttattgacgacgccgtgcgccgcgccaagtccgaccccaagccccaggccgccgacctgctcagcgatgtctacgtcgcctaccactcataacaacaacattcgtggagagaactttatggctcgcaaaatcagctaccagcaggcaatcaacgaagccctggcccaggaaatgcgccgcgaccagagtgtgttcatcatcggccaggacgtgtccggcggcacgggttcccctggcgaacaggacgcctggggcggggtgctcggcgtgaccaagggcctgtatccggagtttcccgaccgcgtgctcgatgcgccgctgtccgaagtcggctacgtgggcatggccgtcggcgccgccacccgtggcatgcgcccggtgtgcgaattgatgttcgtcgacttcatcggctgctgcctcgaccagttgctcaaccaggccgccaagttccgctacatgttcggcggcaagaccaccacgccgctggtggtacgcgccatgtacggcgccgggctgcgggccgccgcccagcattcgcagatgctcacgtcgatgtggacccacatacccggcctcaaagtggtgtgcccggccacgccctatgacgccaagggcatgttgatccaggcgatccgcgacaacgacccggtgatcttcctcgaacacaagatgctctacagcctgcaaggcgaggtgcccgaagagctgtacaccgtgccctttggtgaagccaattttgtccgcgagggcaaggacgtgaccctggtgacgtacggacgcatgctgcacatcgccctggaagccgccaccagcctggcgcgccaaggcatcgattgcgaagtgctggatctgcgcaccaccagtccgttggacgtcgacagcatccttgaaagcgtggaaaagaccgggcgcctggtggtgatcgacgagtcaaacccacgctgctccattgccaccgatatcagtgcgctggtcgcccagcagggtttttctttcctgcgcgcgccaatcgaaatggtcaccgcgccgcacacgccggtgccgttctccgatgcgctggaagacctgtatatccccaacgccgcaaagatcgaagccgcggtgctgcgaatcgccaacaagaggagcgccgcatgatccataccttgaccatgcccaagtgggggctgtcgatgaccgaggggcgcatcgatatctggctcaagcaacccggcgaccgggtggagaagggcgaggaagtgctggacgtggagactgacaaactctccagcagtgtggaggcaccgttcagtggcgtgctgcgccgcgtgcttgcactgagtgacgagacccggccggtgggcgcgttgctgggaatcgtggtggaaggcgaggccagcgaagcagagatcgatgcggtgatcgaacgcttcaatgccggttttgtttccagcagtgccgaaaccgaagcgtcgggaccgagtgcgcagaaggtcgagatagacgggcgcctgttgcgctatctcgagctgggcgaggcggggacgccgttggtgctgattcacggattcggtggcgacctgaacaactggctgttcaaccaaccggcattggccgtcgagcgccgggtgatcgccctggacctgccggggcatggcgagtcgggcaagcaactgcgcagcggcgatgtcgaggaactgagccaggcggtgctggccttgcttgatcacctcaagttcgaccgcgtgcacctggccgggcattccatgggcggactggtcgcactgaccgtggctgaccaggcgcccgcgcgtgttgcctcattgaccctgatcgccagcgccggtctcggcccggatatcaacggtgattacttgcaggggtttaccgaagccaacaaccgcaatgcgctcaagccgcaattgacccaactgttcagcgacccggcgctggtgacgcggcagatgctggaggacatgctcaagttcaagcggttggaaggggtggcgcaggctttgaggcaactcaatgcccagttgttcgagggagggcgccaacgtctggatctgcgcaaggtggtggggcagcaaccgagtctggtgatctggggtagcgacgacgcaatcatccccgtcagtcatgccgaggggttggacgcccaagtgcagattctgccggggcaggggcatatggtgcagttggaggcggcggaacgggtcaaccaactgatggccgccttcctcaaatcccaaccttgaaatgcagcccaatgtgggagggggcaagccccctcccaccatttggattggatttcaaacggaacgcttcagggtctcgctcggcaactccttgaacaacgcccgatagctattggaaaaccgccccagatgccagaacgaccagttcatcgccacctcggccacggtggtcccggctgaactcagcagttcccgccgtgccccattcaatctgcgcaagcgcagccactgcgccgggctcatcccggtgtaggtcttgaacccttgctgcaactggcgcaatggcacgccggcaatctgcgccagttccagcaggttgacggtctcgtccggcgcgtccgccgcccattcgccgatgcgcgccatcagccggcgttcctcgctgcggcgctgcaaggaactgcggtccaggcacacgcaggcgttgtcgaggatgaacaggcaatcgtcgagcaattgctggataagcgcggcggggtcgctgatcgtggacaagcgtgtcagcgtgccactcagccaacgggcgaacaacgcgttctgctggccggtcagtggcgccatgaacaaaccttccagcttcgccacctccaacccatggcgctgcacgaactgcgggccgaacaccaccgccacttcacggtagttttccggggtgatccaggtgttacggctctcgccattgagcaggtacagcgcgttgtcgctgccgtcgaaacagaacgccagggagccggcaggcgcattgaagtgctgttcgacgcgggtgttcatgcactcttcgtacacctccacgccttgcaggtcgaggtagcggatgcgcccggcgaaatgccccggggacatctgctggtactgctgcacccagccgggtgtcgcactgcattgagcggccacatcaccggtggtgaaggcctgtacgcgcaaagcggttgcctgtgtcatggggagcctgggcgcactctattggtgcgttgtggtgcgtgcaaagtggatagatgccggcgggcggcggcctcaagatagacctcaatgcgccaggagtacaagccggcgcatgcacccaacccatgccgaggtccttatgaacgcccccttcgatcagctgtccgcctggctgaaagaacacaagattaccgaagtcgaatgcgtgatcagtgatttgactggcatcgcccgcggcaagattgcgcccaccaacaagttcttgcatgagcgaggcatgcgcctgccggaaagtgtgttgctgcaaacggtaaccggggactttgtcgacgacgagatctactacgacctgctcgacccggccgatatcgacatggtctgtcgcccggtgtcccacgccacttatgtggtgccgtgggccatcgagcccaccgcaatcgtgatccacgacaccttcgacaaacagggcaaccccatcgagctgtcaccgcgcaatgtgctgaaaaaagtcctgcagctctacaccgacaagggctggcagccgattgtcgcgccggaaatggagttctacctgacccagcgttgcgaagacccggacctgccgctgaaaaccccggtgggccgctccggccgcgccgagaccgggcggcagtcgttctccatcgacgccgccaacgagttcgacccgctgttcgaagacgtctacgactggtgcgaagcccagggcctggacctcgacacgctgatccacgaggacggcccggcgcagatggaaatcaacttccgccatggcgatgccctcgacctggccgaccagatcaccgtgttcaaacgcaccctgcgcgaggccgcgctcaagcacaacgtggccgcgaccttcatggccaagccggtggccgacgagccaggcagcgccatgcacctgcaccagagcgtggtggagatcgccaccggcaaaccggtgttcgtcgatgccgacggcaacaagagccagttgttcctgcaccatatcggcggcctgcagaagtacatccccaagctgctgccgatgttcgcgcccaatgtgaactcgttccgccgcttcctgccggacacctcagcgccggtcaacgtcgagtggggcgaagaaaaccgcaccgtcggcctgcgcgtgcccacctccagccccgacgccatgcgcgtggaaaaccgcctgcccggcgccgatgccaatccgtacctggcgattgcggctagtctgctgtgtggctacctgggcatggtcgagcagatcgaacccagcgcaccagtggaaggccgtgcctacgagcgtcgtaacctgcgcctgccgttcaccctcgaagatgcgctggcacgcatggaggactgcgacacggtcaagcagtacctgggcgacaagttcgtgcgcggctacgtcgcggtcaagcgcgccgagcacgagaatttcaagcgggtgatcagttcctgggagcgtgagttcctgctgttgagcgtctaaaaaaccaataaaggggtgtcgatatgcgtcttgtgaaacagcttttcccgctggccctggtggccgcgttcagcagcgccagccaagcggcgccgacagtcagtatctacaactggaccgactatatcggcgagaccaccctggccgacttccaggccaagactgggatcaagccgatctacgacgtgttcgactccaacgagaccctggaaggcaagttgctcgccggccgcaccggctatgacgtggtggtgccgtccaaccacttcctggcgcggcaagtgaaggccggtgcgttcctcaagctcgaccgcgcgcagttgcccaacttcaagaacctcgaccccaagctgctcgcgctgctggagaaaaacgacccgggtaacgcgcattcggtgccgtacctgtggggcaccaatggcatcggctacaacgtcgacaaggtcaagcaggtgctgggcatcgaccatatcgactcatgggcggtgctgttcgaaccggagaacatcaagaagctcaaccagtgcggcgtggccttcctcgattcggcggacgagctgttcccggcgatcctgaattacctgggcaaggatccgcgcagcgagaaccctgaagactacaagcaggccgaagccaagctgttgacgctgcggccgtacatcacctacttccattcctccaagtacatctcggacctggccaacggtgatatctgcgtggctttcgggtattccggcgacgtgttccaggccgccaaccgcgccaaggaagccaagaacggcgttcacatcgcctattcgattcccaaggaaggctccaacctgtggttcgacctgctggcgattcccgccgacgcgagcaacccgaaagaagcccacgccttcatcaactacctgctcgacccgcaagtgatcgccaaggtcagcgcctcggtgggttatgccaacgccaatccggcggccaaggcgttcatggaccctgagttggtgaacaaccccgaggtatacccgccgcaggcggtgctcgacaaactctatatttccaccacgccgaccccggcgaccatgcgcctgatgacccgcgcctggagcaaagtgaagaccaacaaatgatgcagtcgactgaccacgcccggtcctactaccgggccacggccaacgccctgacggagcgccccgcattgggcgccgacttgagcgccgatgtgtgcgtgatcggcggcgggttcactggcgtaaataccgccatcgaactggcccagcgcgggctctcggtgatcctgctggaagcccggcgcatcggctggggcgccagcgggcgcaacggcgggcagttgattcgcggtatcggccatgacgtgtcgggatttgccaaatacgtgggcgaggagggcgtgcgttacctggagcgcgccggtatcgagtcggtggccttggtgggcgagcgcattcgcgagcatgggattgactgcgacctgcgctggggcttttgtgaattggcgaacacgcccgcgcaattcgccgcgttcaagggcgagcaggcgcacctggcggagctggggtatgcccatgaaacccgcctggtcggcgtgcaagatatgcagcaagtggtcggatcgacggtgtatgccggcggcctggtggacatgggttccgggcaccttcacccgttgaatctggtgctgggtgaagcgcagttggctgagtctcttggagtgcggatcttcgagcacactgaggtgcttgaactgatccacggcgacacggtgcaagtgcgctgctcaggcggcacggtacgcgccgaccacctggtgctggcctgcaatgcccatctggaggaactggaaccgcgcctgagcggcaaggtgctcccggcgggcagctacatcatcgccaccgagccgttgtcggaagatgtggccaaccagttgatcccgcagaacctggcgctgtgcgaccagaaagtcggcctggattactaccgattgtccgctgaccgccgcctgttattcggcggcgcctgtcattactccggccgcgatccggtggacatcgccgcttatatgcagccgaaaatgctcaaggtgttcccgcaactggcccagaccaccattgagtttcagtggggcggcaagatcggtattaccgccaaccgctttccgcaggtggggcggttgaagcagtaccctaatgtgttttatgcccagggctattccgggcatgggttgaacgtgacgcactggtgtgcaaggttgttggccgaggggattcacgccggtcacagtgccggcctggatattttcagccaggtgccgcatatgaccttcccgggggggaaggcattgcggtcaccgctgttggcgttggggatgatgtggtttcggttgagggagatcgtgcagtgaagcgttgcaataaggactgaatagctacattcgaacgcgatttgttatgtccccgaaaggagggcgagtgtaggcaaacctcttattaaccacgcaggtcactatagatctttcgttggcgatgttctttgggttttcacatatccataggcttttgacgggcccctgcgtgttggcgagactcgtgagtggggttgcaagagctgttgtgaatatgggcaggcccaacacaatgctcaatataggtaaggtccaagtattgtgtttcattgaggtgtttcccgaaggcagtttcggagaatggtttcctttttcaaggcaacatagcccctaccgcatcgaagttaacggccgcatcggtcgaggatcccactgcgtacgcgcctgcgggtgaaatgctattcaggttgctgctcccccctggcgtaaggggcgatatggcgaccgtgcccgccgagggggtccaatagcacgccgtggataattggttggcgttaacacaattcaaggcaacggtatcgttgttggaaaaaccaactgcttggatcagattgttgccgggcagcggattgaccggttgcacggtgaaagagtttgcagggtcttgccagtaaaaaggtatatcaagtcccgtaggttctttgccgtacgccaatacatgcccaagatcattgatcgccacggcgtggttcagtgcattcagaggcaacgtcaggagcaaaggtgtttggtcataaaactcccagaaggcggtttgccgtgtgtcggcggccgacccgggaaacgtgcaggtgcctgcaatcctgccctgattgttcatgtctacggcaaagcagtaaatggctcccgtcggtagcttcgcgggttctaacgtatagccgctaccgttccacctggcgaccttgatgacgggagggccgtctggtccagggcaattcaacaggataagcgggcgcccgccgaacagggtttcggtcaagtcaacgccagtacagttgtcgccccagcccgacacccgctctggcgtggagttacccgcggtgtagatcaccaccgtcggaactccgcttgcgctcaggcttcgcgccacaaccaccccgttctgattttgtgcggttggcgtcgtttgtttgtcagccgggcgcaacagcgggaacagcaaggtgcctggcagcggattcataggtgttggtgtaacggctggggttgcggggttccaaaaaacgccgaacaggacgccaaggctgttggcgcagacccccactatcgaattattgctggtgttggcgatagccgatacttggcaaggctgacctgcggccagcggcgccagcttttgctgggggcctgccagtgttgccgagtaccatggaccgatgttggcactgggtgttgtcgaactgcagtcgcccactatttgcccgctgtcgttgcccccaatcgtctcgcattgcactccggcagcatggcccgaactgacgaatgtcgccgcactggcactcaatccatacccgcaaagcaacacacccacactcaacaccatcggtgcaatcagttgtctcaacaaacgttgcataatccgtccttccctggctgacagaatgacccactgggggtgaacccccacggtccctgaatgccagtaaacgccaggttcgatggacgcacaactgtcacttctgacaggtacaggaggagttgccttaagcctcggtcagcactttcctgaacgtttccaccaacggccgcaaattgacccgatgccacgccacccacagtggcgtggtgtacgtcagccacggtaattcgcgcaagatcacgccgggcggtgcattgcggctcaggcctttttgcaccatcgccacacccaaccctgaagccaccaaccccagcgcggtaaacggctcgctcgcttccatggggatctgcggggtgaagccggcgcggatgcaggcggcgacgaagtcatcggcggggttggcgccgggtttgcgctgcacgccgatccactcctggtcggccaggtgttcgggcaacatttcactcaggcgtgccaagggatggtgctcgggcaacgccagcagcatcggttcgtccagcacctgcaaggcggtcaggtccggatcatcggcggccggcggttcgccgaccagggcgatatccaggctgcgttggcgcaggccttcgagttgttcgagggacggcaggttatacagcttgatgtgcacgttcggccggtcgtcgcgcagtacccgcagcgcgttgggcagcacaccggcatgcatggcgttttcgatatagccgatgcacaggccaccttcttcaccgcggcccaggcgcttgcccagtgattccaggcggttggcgtgggtcagcagcgccttggtttctgccaggaacgtctggccgtcacgggtcaggcggatgcgttgctggctgcgttcgaacagggtcaggcccaggcgttcttcgagctgggcgatctgccggctcagcggcgactgggagatgtgcaggcgttcggcggcgcggccgacgtgttcttcttcggcgaccacttcgaagtagcgcaattggcgtagatcgatcatgtaagacctatggggactcaagttggtcgcagtatgtcttggacggtccgacctctgcaatctagcatctgttccacggtcacagcgaccctttgtactgttgagaatccatcatgaacttgaaagacaaactgcccggcgtccagggcttcggcaccgcccgtcctgccgctttaacttcaggagttcaaccatgaaaatcgatgtaagcggcaaagtagcgattgtcagcggcagcactgccgggatcggcctgggcatcagccaagcacttgcagcctccggcgccaccgtggtggtgatcgggcgtgaagccggcaaggtcgacgatgcactggcgagtatccgtcaggctgtcccaggcgcagacctgcgtgggctggtggctgaccttggcaccgcagagggcgcagagaaactcttcgccgccgaaccgcgtgccgacatcctggtcaacaatctgggcatcttcaacgatgtggattttttcgatgccccggacagcgaatggacgcgcttctatgaggtcaatgtgatctccggtgtacgcctggcgcggcattatgtgccgggcatggtcgggcagggctggggacgggtgatcttcgtgtcgtcggaatccggcgtggccaccccggcggacatgatcaattacggtgtgaccaaaagcgccaatttggcggtgtcccatggcctggccaagcgcctggcgggcacgggagtgacggtgaacgccgtgctgcccggcccgacctttaccgacggcctggagcagatgctcagggacgccacacaaaaatccgggcgcagcgcgcgggatgaggcggacgtgtttgtgcgcaatgcgcggccgacatcaatcatccagcgcgcggcaaatgtggatgaagtcgccaacctggtggcgtacattgcttcaccgctttcttctgcgacaaccggtgccgcattgcgcgtcgacggtggtgttgtcgacagcatggcgatctgaattgtttttcattttctggagtatttatcgtggcaacagcctcttctgtgattgaaatcccggtgtcggccgatcaggtctggcaattggtcggcggcttcaacagcctgccggactggttgccgttgattgtcaaaagcgagccaagcgatggtggccgtgtgcgtcacctgcaaacggcggacggcgcagtgatcgtcgagcgtttgcagagctttgataacgtcggacgtacctacagctacaccatcgagcagtcgccgtttccggtgagtgcgtatctggcgacgttgcaggttgaggcgctgacggacgcttcggcgaaagtgacctggtccggtgtgtttacaccagtggcggggactacggatgcggcggttgaggagctgtttgccggtgtctacagcggtggtcttgaggccctacgcgccaacttcccggcctgatccagtccaatgtgggagggggcaagccccctctcacattgggacgcccatgttctcaggcctcgggcatcagttgctggcggcactccagaaccaatctggcaccgccttgctcactcgtacccacgtccaacttgaagccatgcaagttgatgatcgccgccacaatcgacaagcccaatccaaacccaccttgctggtcgctttcatccacgcgatagaaacgctggaacaccgcatcccgctctgccgccggtatgcctggcccggagtcgtgcacttcaatgcgcgtgctgcccgcatcgttgaccccgcgcagaatcaccgcgccgcccgggggggagaacttgatcgagttgctcagcaggttggccagggcttcgaacaacagggcgcggtcgccggtgatccatggcagggactccggggtttcgagcttcagttgcagttcaccttcttcggccagtggcaggtagaagtcgtgcaactcgcgcagtagcggcagcgggtccatgaccaggaaaccggagcggcgctgatggtcctccagctcggagatgcgtaacagcccgcgaaagcgcgccatcagggtgtcggtctcggcaattgcatcgtcgagtttcaccgcgtagtcggactcggcctccgcctcctgcttgatgcgatacagctgcgcacgcaggcgcgtcagcggggtgcgcaggtcgtgggcgatgttgtcgcacacgcccttgacctcgttcatcagcttctcgatgcggtcgagcatggcgttgacgatggccgcgagcatgtccagttcgtcacgccggttggacagcggcaggcggtgggtgaggtcgccggcgacgatggcttcggcgctggcctggatcccacggatacgccgcaacgggcggcggcgcagcaagtgccagccggccgcgccgggaataatcgtcagggacaatgcccagagcagggcatgccagatgatccgggtcacgccgaacagcgaaccgttggcccgcaccagcaccagccaacggccgtcttcggtgtgagtggctacggcgtcgcagctgtctttgggcaatttggggtcgtcggactcgacgcaattggccagggcgtggatcttgccgtccagcggcaggtccggcgggatcgcacgaatcggcccgctcaaggggcggaattgttcatcgaacaggccgtaggcatccacgcccttcatgtcgaaggtcatgctggtggtcagggcctccaccagttcctcgccgtcgaagcgctggaacaggtgctggcgctgcatcagggagtggcgcgacaggtcgcccaggtaaccggacacctcgtaatacagcacccccatgaggatgcagctccaggccacgaacagcgagctgtacagcgccagcaggcgactgctggaggagcgccagcctttagaggggttcagcaatgacataaccggagcctcgtaccgtgcggatcagcggcgtgaggcccggtgggtcgatctttttgcgcagacggccgatgtgcacgtcgatcaggttggtgccggggtcgaagtgatagccccagacttcctcgaagatcatcatccgcgacaggatctgcccggtgttgcgcatcaggaactccagcagtttgtattcggtgggcagcaggctcaggggttgatcggcgcggctggcttcgcggctgatcaggtttagctccaggtcggccacacgcagggcggtttcgaattccttgaccgtacttttgcgtcgcagcaacacctcgacgcgggcggccatttcatccgaggcgaacggcttggtgaggtagtcatcaccgccggcacgcaggccacgcacgcgttcgtcaacgtcggagagggcgctgatcatcaggatcggcgtggaaacgccgatggtgcgcagggtcgtcacgatggccaggccatcgagttccggcagcatgcggtcgagggtgatcaggtcgtaatcgccgctcacggcgcggaccaggccttcgcggccgttgtctacccaatctacatccagtccatggctactcagctcggcgacaatctcgcgggccgttacggcgtcatcctcgatggtcaaaatacgggtcataggattacctggtgagcgattcacactagaagtgggggcattttgccaagaaacggctgaatgcttcctaaataaaacttcatgttggcaaaactgacacagatttcatcgcctgccggggaatgcataacgcccgcttcaaacggccatttcttgcaagttgcatggatcaggttagttcaatttacttaattcattgaaatctaaggattttattttttgtccaggctggcatggtgcctgcactgtcccttttgagacctgtaacactatttttctgccttggagcaaaacaacaatgatcacatcctcatccacgctgcaagagtcgagcgcgctctccggggtttcctggggggcgatttttgccggggccgccgccgcggctgcgctgtcgctgatcctggtgctgctgggcttcggcctgggcttttcggcagtgtcgccgtgggccgatagcggtatcagtgccaagggcttgggtatttccacgattgtttggctggcctttacccagatcgttgcatccggcctgggcggttatatcgccggccggttgcgcgtgaagtgggccaatatgcatggcgatgaggtgtactttcgcgacaccgcccatggcttcctggcctgggccgttgccacgctggtcactgcggtattggtggtcggttcggtcagcagtgtggtcagcggtggcgtgaaagccggtgccagcgttgcagccggtgccgccagcggtatcacccaagccgccggcagtgccgccaaaggtgccaacagcggcgatttcgattactacgttgacagcctgttccgtgatgatcgcccggtcgccgtcagcgatgacgccgcccatggcgtggtggcccgcatcttcacccgcaccctgagcaacgacggccagcttgcacctgaagaccgtgcctacctggcccagttgatcagccagcgcaccaacctcagccaggcggatgccgaagcgcgcatcgacaaagtctacggtgacgcccgtaaagcggtggaagacgccaagctcaaagccaagcaagctgcggaaaccgccgcaaaagtggctgcgtatacctcgctgtggaccttcgtcgccctgttgatcggtgcgttcttcgccagcctcgccgccacctttggcggtcgccgccgcgatgccgtggtgtatgtcgaaaccgaacacttcgttcgttaatcaattcaaggagaacaacatgcgctcattactgctctggttcctcggtgtgcctatcccggtgatcatcctgattgcgatcttcatgcactgatcctcgctcaggtttctcaaggccgcgtctgtttccacaggcgcggctttttttgtcttacgggtacgaaggcttatacctgtcaagtttgacagtatcgccgggctctgaaagtgcctagtttgtttaagtcccaactcactgagagcacggtcatgaatcaaactaccggcacattgacggcaactgtcgtcaacccacaagtcattccaccgaaccaaccgtttattggcgatcccggtgaaatgctgatgtaccgatcaggtggatatatacacattgcggcaacgcaaaggttgggacccacggtcaatgatttcaacggtttcaattttcgtataccgaacatcattgcgggcagtgggtcgcacaccttcgtgcttggcgttactgctcggggtatctattgggctcatgagcttggtggtgtcacgccgtacacggctgtaaatggcagtctcactgtttcattggaccagaaggacacgttgacggggacgttcaacttcccgggagaaaacggcagccaacacatcagtgtcagtcagggccagatcgacctggcgggctttattacccagccagtaccggtacggctgccaacggttacaggtacaggctatatgcgaggagacgtcgtaggagggcctttgccaaaccagaactttgacgcggcagttgtcagcctcagggaagtcgatggcggcggcatcagcaagaactactttgaattcattggcaggcagtacaacgagttaggaattcagaactatgttgccatcttgctggacgttgaccagacggcgcttacctacgtgttagggagtaaccgtgaagcccgagctcttttcgcggtgatggactcctttgggtttgcgtatgccatcagcgggtcgttgaacttcacctctctgcctgccagcggtcgcgcagccggcagcctcgactgcatggtgcagaagaatcaggagccacccttccatgtcaatgttgtgttcgatatcacagcttaggttcagccagcggacctgatggggtaacggccaacgtctcacgcaattgttaatagcggcttaacccgtgcttggctagactcgcgccccatgagccgccttctgcgtttagtcctggtcctgctgctgagcctcacgcttcccctgacagggatggcgggtgtgccgtcgagcaccgagccctgcccgatgaaaatgtcgggcatgccgatgatgagcgacatgtcgcccgactgctgtcaggacggtgctgaacatggcaaagcctgcaagcccggccaggaatgcaagaccggtagcctgctgcaactgtccctggcggtgctcaaggcgccgttgccctcggcctatccgctgcgcgtcagcgcctcttcggaattcatccctgaccgcacgccatccggcgtctggcgcccaccccgttcctgacccctgttgcacctcaagacgcatcccctgaccgggatggttttgctgtgggccgcctgacgcggtgcacagcgcaacggaacaggaattttcaacatgaatgcctcctacatgcgcgccctggtggtgggcgtgctggcgtggccggcgttggcgagtgcgctgaccctggatgacgccctgcgcctggcgcaaaacaatgcaccgtcgctgcaggccgagtcggccaagttgcaggccgccacccaggcggcgatcccggcgggcgaattgcctgaccccaagctggtggtcggcctgcagaactttcccattggcgggcccaatcgcggcacgttgtatggcgacgagatgacgcaacagatgatcggcatccagcaacaggtgcccagccgcgacaagcgcaaggcccgggtcgagctggccgatgcaaccatcgaacgggcagctgccgaggggcgcatcgagcgcctgaacgtgcgccaggccacggcccaggcatggattcgggcgtatgcggtcgcgcgcaagcaagccttgttcaaggacttctaccaacagaaccgtctgctgcaagacaccgtgcgtgcgcagttggccggcggccgtggccaggccgccgacgcggtcatcccccggcaggaagccgccgagctggccgggcgcgacgatgagttgacccagcaacgtgcccaggcccgtgccgcgctcaagcgttggatcggcgcggccgctaacgaagctcccagcggtcaactgcccaactggaccttcgacccccacagcctgaaccacaacctgcaccagcacccggcactgcaagcctacgtgccgcgcacccgcgaagcgcaggcgcgcttgcaggatgcgaaggcgcaaaagacttcggactggagttgggaggtcgattacgggcaccgcagccgtgagttcggtgacatggtcaacgtgcagttcacctttgacctgccgatctttcccggccgtcgacagaaccccggcatcgccgccaaacaggccgaactggaccagcttgacgccgagcgcgcagccgcgacccgtgagcatacccagatgctcgatgacgacctggccgactaccagcgcctggaccgcgcggtacagcgcagccaggacagcctggtgccgctggccgaggaaaaagtcagcctgagcctggccggttaccgcgccggcaaaggcgacttgatgacggtggtcaacgcccgccgtgagctggtcgaagcccgtttcaagcagatcgatgccatcgaacaacgcgccctggtcggcgcgcagttgtatttcgcctatggggaacccgccaatgaataatcgaatcgtggccgctgtgttgctgctgggtctgggggccggctatgggctggcgcagtggcagcccggggcacccgcaatgcccgtaaaatccgacaagcaggcgctgtactggtatgacccgatgttcccgcaacagcagttcgataagcccggcaagtcgccgttcatggacatgcaactggtgccgcgctacgccgatggggcggtatcgacggctacgccggcggtgcagatcgatccgggcctggcgcagaacatcggcgtgcgcctggcgagtgtgagccgcggcgtgctgacctcccgcctggacctgtcgggcatcctggccttcaacgagcgtgatgtggcggtggtgcaggcgcgggcggcggggtttgtcgagcgggtctacgcacgggcaccgggggatgtgctcaaggccggtgcgccgttggtggacctgctgatacccgagtgggcggccgcccaggaagagttcctggccctgcggcgcagcggcgagcccggcttgatcgacgctgcccgccaacgcctgcgcctgagcgggatgccggcggggttgattgcgcagatggaacgcagcggccaggtgcagtcggtcttgaccgtgaccagcccgatcagcggcgcgctgcaaaccctcgacgtgcgcgaaggcatgaccgtggcgccggggcagaccctggcgcggttcaacggcctgggctcggtgtggttgcaggtcgccgtgcccgaagcccggggggccacgttgaaagtggggcaaaccgtgcagagccgcttcgtcggtttgccgggcgagacgctcgacggcacggtcagcgcgatcttgccggccaccgccacggacagccgcaccgtgcaagtgcgggtcgagctgcccaaccccgaaggcgccctgcgcccgggcatgaccgcccaggtcagcctggcgcagaccagcgggcaagcgttgttgcaggtgcccagcgaagcattgatccgcaccggcaaacgcgtgctggtgatgctggccgaggagggtgggcgctatcgtccggtcgaggtcgaaaccggcgcggagaaccaggatcgtacggtgatcctcagtggcttgcaggaaggtcagcaggtggtcgcgtccgggcagttcctgctcgactccgaggccagtctcaagggcattaccgccaccgctgcggaagctgcgatgaacatgcagccgggagcccagccatgatcgcgctactgattcgctggtcggtggccaatcgtttcctggtgctgctcgccaccttgttcgtcaccgcgtggggtgtctggtcggtgcagaacacacccgtcgacgctttgccagatctatcggatgtgcaggtaatcatccgcaccccgtacccgggccaggcgccgcagattgtcgagaaccaggtcacgtacccgatgaccactaccatgctctcggtgccgggggccaagaccgtgcgcggtttttcgttcttcggcgacagctacgtgtacgtgttgttcgacgaaggcaccgacctgtactgggcgcgctcgcgggtgctggaatacctcagccagttgcaggcgcggctgccggcatcggccaaaccgtcattggggccggacgccaccggcgtgggctggatctaccagtacgccttggtggaccgcaccggccagcacgacctggcgcaattgcgcgcgttgcaggactggttcctcaagttcgaactcaagaccctgccgaatgtggcggaagtcgccaccatcggtggccaggtcaagcaataccaggtgcagctcgacccgctggccctggccagtcgcggcatcacccaggcgcaggtgaaagcagcgattgaccaggccaaccaggaagccggcggctcggtattgaacctgggcgagtccgagtatgtggtgcgtgcctccggctacctgaagaatctctctgacttccgcgccatcccgctgcgcctcgacgccaacaatgtaccgctcaccctcggcgatgtggcgaacatccagctcggcccggacctgcgccggggcatcagtgagctggacggcgagggcgaagcggtcggcggcgtggtgatcctgcgcagcggcaagaatgcgcgggaagccatcgcggcggtcaagaccaaactggaacagttgaaaagcagcctgccgcccggtgtggaaatcgtcaccacctacgaccgcagcaagctgatcgaccgtgccgtggacaacctcagccataaactgctggaagagttcctggtggtggccctggtgtgcgggattttcctgtggcacctgcgctcgtccctggtagcgatcatctcgttgccggtgggggtgttgatcgcgtttatcgtcatgcgcttgcagggcatcaacgccaacatcatgtccctgggcggtattgcgattgccatcggcgcgatggttgatgcggcggtggtgatgatcgaaaacgcccacaagaaaatcgaagcctggcaccacgccaaccctggccgggaactcaagggcgatgcacattggaaggtgatgacggacgcggcggtcgaggtcggcccggcactgtttttctgcctgctgatcattacgctgtcgtttattccggtgttcaccttgcaggcccaggagggccggctgttcgggccgctggcctacaccaagacctacgccatggcggccgccgccgggttgtcggtgaccttgatcccggtgctgatgggctactggattcgcgggcgcatacccgacgagcaacgcaacccgctcaatcgcggcctgatcaagctctatcagccggcgctggaggcggtgctgcgctggccgcgcatgaccctgctggtggcgctgctgatggtggcgagcgcgctgtggccgatctcgaaactgggcggtgaatttctgccgccgctggatgagggcgacttgttgtacatgccttcggcgctgccgggtttgtcgacacagacagcgggtgaactgctgcaacgcaccgaccggctgatcaagacggtgcccgaagtcgcccatgtgttcggcaaggccggccgcgccgaaaccgccaccgacccggcgccgctggagatgttcgagaccactatcgagttcaagcccaaggaccaatggcgtcccggcatgaccccggacaaactggtcaaggaactggaccgcgtggtgcaggtgccgggcctgaccaatatctggatcccaccgatccgcaaccgtatcgacatgttggcgaccggggtcaagagcccgattggcgtgaaggtcgcgggcaccagcctgatgcagatcgatgcggtgacccaggccgtggagaaggtcgccaagactgtgccgggcgtgagttcggcgttggccgagcgcttgaccggcgggcgctacatcgacgtcgacatcgaccgtgccgccgctgcgcaatacgggctgaacatcagcgatgttcagtccatcgtgtcgggtgcggtgggcggtgaaaccattggcgaaaccgtggaaggcctggcgcgtttccccatcagcctgcgttacccgaaggaatggcgcgactcggtggaagcgctgcgcaacctgccggtgtacacgccacagggcagccagatcaccctgggcacggtggccaggatcaaggtcaacgatggcccgccgatgctcaagagtgaaaacgcgcggccttccggttgggtgtatatcgacgtgcgtgatcgtgacctggcttcggtggttcgggacctgcgtgcggcgatcaaccagcaggtaaagctgcaaccgggcatgagcctcagctattcggggcagttcgagttcctcgaacgcgccaatcagcgtctgaaactggtggtgccggccaccttgctgatcatctttgtgctgctgtacctgacctttcggcgggtgggggaggcgctgctgatccttgcgaccttgccgttcgcgttgaccggcggcgtgtggctgctttactggctgggcttcaacctgtcggtggccacgggcgtgggctttatcgcgctggcgggggtgtcggcggagttcggcgtgatcatgtggctgtacctgaagaacgcctgggccgagcgcaaggatggcaatctattggcggccatcaccgaaggtgcggtgctgcgggtacggcccaaggcgatgacggtggcggtgatcattgccgggttactgccgattttgctgggcagcggcaccggcagtgaggtgatgagccggattgctgcaccgatgattggcgggatgctgacggcgccgttgctatcgctgttcgtcattcccgcagcctactacctgatgcgccgccgataaacatgtgggagggggcttgcccccgatagcggcggatcagacacaaatccagtgactgacacacagctatcgggagcaagctccctcccacaagggatctccaacgccggcaggttcagtcgtcgaacccgacctgctcgtgaatctcatccaccttcaactccaaccggtacgccaccgcgataaacaacgcctggcacaggcacaaggtggcgctcaacgagcggaaggcaaacgacgagccttcattcaccaacagcactgcgttagcccgcttggccaggggcgacaggttgctgtcggtgatgatcagcgtcttggcctggtggtgctgggcgatgcgcaggcagtgctgggtctctttaccgtagggcgtgaagctgatggcgatcaccaggtcattggcgcgcacgctgcgcatctgctcgcggtagctgccgcccaggcccgagatcaggtggatgcgcttgttggtgtgctgcaggttgtagaccaggtagtcggccaccgcaaaggaacggcgcacgccgaccacgtagatattgtcggcgttgaccaccaggtccacggctttgtcgaaggcgacatcatccagctccaggcccaggcgctcgatgcccgacagcgtggcgttgacgcattcgcgcgccaggtcgccgccgctggctttctgcgacttgttggcgatcatgctgcggatgcgctgctggtagttctgcaccggcgtggtcttgtgggtgtaggcctcgcggaacagcgcctgcatctcactgaacccactgaacccgaaacgctgtgagaaacgcacgatggccgacgggtgcacttcgcattcgcgggcgatgtcgctgatgcggtcgaccatgatccggtcgctctgctggctcatgtagctggcgatgcgcttgagctggcgcggcaggctctcgtattcgtcggtgattagctgcaacaggcgctcggcattgatcggagggctggcgatagagtcttccagggtggtctcgggatcggtgcgggacatgggcaatccttctggcgttttcgtctgttgcgctgatgggtggcgcaagtctacagggtaggcgcaaaaaaataccccggcatcacggccggcgtggcctgctgaaacgatgcactgtggtgggagcgcccctgtacgagcttaatggaaaaaatattccaatgaaaaaatatctggaataaatattgattggcgccgccggacgttctagtctgctcccaccaagagcgtttgccgcccccacggcggcacaacgcaggctgataaaaataacaggagccagcatgggccagactcgttttgccagtgggcgtcaattggatctgatttgcctcgggcgcctgggcgtcgacctctatgcacagcaagtcggtgcgcggcttgaggacgtgtccagcttcgccaagtacctcggcgggtcctccgccaatatcgccttcggcaccgccaggctcgggctcaagtcggcgatgctgagccgggtcggcgacgaccacatgggccgtttcctggtggaatccctggcccgcgagggctgcgatgtcagcggcatcaaggtcgacccggaacgcctcaccgccctggtgctgctcggcctcaaggaccgcgaaaccttccccctggtgttctaccgcgaaaactgcgccgacatggccctgcgcgccgaggacatcaacgaagcctttatcgcgtccagcaaagccctgctgatcaccggcacgcatttctccaccgacggcgtgtacaaggccagcatccaggccctggattacgcggccaggcacaacgtcaagcgcgtgctggatatcgactatcgcccggtgctgtggggcctggcgggcaaggccgatggcgaaacccgttttgtcgccgaccagaatgtcagccagcacgtgcagaagatcctgccgcgcttcgacctgatcgtcggcaccgaagaagaattcctcatcgcgggcggcagtgaagacttgctcgctgccttgcgcaaggtgcgtgaactgaccccggcgaccctggtggtcaagctcggtccgcaaggctgcacggtgatccacggcgccatccccgcacgcttggaagacggcgccatctaccccggcgtgcgcgttgaagtccttaacgtgctgggggccggcgatgcgttcatgtcgggcttcctcagcggctggctcaacgatgccagtgatgagcgttgcagccagttggccaatgcctgcggtggcctggtggtctcgcgccacgcctgcgcaccggccatgccgacgccggcggagctggaatacctgttcaacagcccggtgccgatcacccgtccggaccaggacgtgaccctgcaacgcctgcaccgcgtgacggtgccgcgcaaaagctggaagcagctgttcgtgtttgccttcgaccatcgctggcaactggtggacctggcgcagaagggcggccaggacctggcgcgcatcagcgaggccaagcaactgtttatccaggccatcgaacgcgtcgagcaaaagctcgccgaacaaggcgtggaagccgatgtcggcctgctcgccgaccagcgcttcggccaggacgcactcaacgccgccagcggccgtggctggtgggtcgcgcgcccggtggaagtgcagaactcgcggccgctggtgttcgagcatggccgttcggtgggcagcaacctgatcgcctggccccaggaacagatcatcaagtgcctggtgcaattccacccggacgacgaaccgctgctgcgcctggaacaggaagcgcaattgaaagcggtgtacgaggcgtcgattgtcagcgggcatgaactgctgctggaagtcatcccgcccaaggaccacccgtccacgtatcccgacgtgctctatcgcagcctcaagcgcctgtacaacctgggcatctacccggcgtggtggaagattgaagcgcagtcagccgaggactggcagaagctcgacgccctgatccaggagcgcgatctgtactgccgaggcgtggtgctgctgggcctgaatgcctcggccgaatgcctcgccgatggcttccagcaggcccgcctgagcactacgtgccggggttttgcggtgggccgcacgatcttccaggaaccgagccgggcgtggatggccggcgagatcgacgatgaaaccctgatccaacgggtgcaagccacctttgaacagttgatcaacgcctggcgcagctcccgaggctaaacccaattcctgatttgaaatgcaatccaatgtgggagggggcttgcccccgattgcggttgttcagtgacagcagtggtgtctgacactcagctatcgggggcaagccccctcccacatacagcaaaaagcagatctcagtgatacctgaaaataataaaggtgcagccatgcccgcaatccgaattggcatcaacccgatctcctggagcaacgacgacctgccggccctgggcggtgaaacgcccctgagcaccgccctgagcgaaggcaaggaaatcggctacgaaggcttcgaactcaacggcaaattccccaaggacgccaagggcgtcggcgacgtattgcgcccgtacgacctggcgctggtctctggctggtattccagccgcctggcccgacgctcggtggcggaagaaatcgcggccatcgccggccatgtcgagttgctcaaacagaacggcgccaccgtactggtctatggcgaggtggccgattcgatccagggctcgcgcatccgcctgatcgaacgcccacgtttccacagcgaacaggcctggcaggactacgccgacaagctcaccgaactggcgcgcttcaccctgtcccagggcgtgcgcctggcgtatcaccaccacatgggcgcctatgtcgagtccccggaagacatcgaccagttgatgcagcgcaccggccccgaagtcggcctgctgttcgattcgggccattgctacatgggcggcggcgagcccatagaggtactgcgcaagcacatcgaccgcgtctgccatgtgcatttcaaggacgtgcgcaaaccggtggtgcaactggcgcgcaaccagatgtggagttttcccgactgcattgtcaacggcactttcaccgtgcccggcgatggcgatatcgacttcgccgaactgctcgatgtgctgctggccgcccactatgaaggttggctggtggtggaagccgagcaggacccggccgtggcgcccagctatctctatgcgaaaaaaggctacgacaccctgcgtgcgcttctgaatgagaggaccggacaatgagcctgttggtcaaaagcagcaaacgcggccagaccatggtcgccctggaacccgggcgcctggagtacgtggggttcgccgcctaccgcctgagcctgggcgaaaccctgccggtcagcgccggtgaccaggaactgtgcctggtgttgctcagcggccgcgtgaacatcgagggcgagggcttcaactggcagaacctgggcgatcgccagtcggtgtttgaagacaaatcaccgttcgccgcctacctgccgccgggcaccgatgcccaggtcaccgccctgagtgatgtgcagattgcggtctgcgccgcgcccggcgccgaaggctacgaaccgcggctgatccgcccggaaacctgcaagcgcagcgtgcgcggcaaaggtgccaacacccgctacgtgtgcgacatcctgcccgacagcgagccagcccattcgctgctggtggtggaggtgcgcacgccgtccgggcattcatcgagctacccgccgcacaaacacgacaccgatgacttgccgcgccagagcttcctcgaagagacctactaccaccagatcaatccgccccagggctttgtgttccagcgcgtctataccgacgaccgcagcatcgaccaggccatggccgtggaaaacagcgacctggtcgtcgtgcccaagggctatcacccggtcagcgtgccctatggctacgagtcctattacctgaacgtgatggccggccccaagcgcgcctggcatttccacaacgacccgcagcacagctggctgctggacctctaatcagcggttccggacggagaataacaacaatgaagtcgcctctacgtttcgcccttaaccgcatcgtcgcgcccaacctgtccctgccggatttcatccagctggcggcggcgctcaagtgcgatgccatcgagttgcgcaatgacctggcggacaagcagatcgagttcggcaccccggccagccgcgtgcgcgagttgtgcgcggtgcagggcatcacggtgctgtcgatcaacgcgctgtacccctttgacgtgtggaacgacgagcgtcgtgcccaggcaatcaagctggcgacctacgcccgcgagtgcggcgcccagggcctggtgatgtgcccgctcaacgagccgggcgacacgcgcaacgaggcccagcgtgcggccggcttgcgcacggccttgagcgagctggcgccgatcctgcgcgagtacggcatcctcgggtttatcgaacccctgggctttgaagagtgtgcgctgcggcgcaagcgtgtggcggtggacgcgatcaagtccatcggcggcctggatgtgttccgcctggtgcacgacaccttccatcatcacctggccagcgagcatgagttcttcccggagttgaccggactggtgcatatctccggcgtcgaagataccgaggcgccgctgagttcgattcgcgacggccaccgtgttctggttggcgagggcgacatcctcggcaacgcggcgcagatcgacaccttgctcagcaccggctacagcggctacctgtcgttcgagccgtttgccgagagcgtgcacgggctggcggatatccagcaggccttgggcgcaagcatcgcccacctgcagaaacgataaggggcgcgacatgaccacaacccgactgaccatggcccaggccctggtgaagttcctggacaaccaatacatcgaagtcgatggcgtgcagagcaagttcgtcaccggggtgttcaccattttcggccacggcaacgtgctgggcctgggccaggccctggagcaggacagcggcgacctggtggtgcaccagggccgcaacgagcagggcatggcccatgcggcgatcgggttcgccaagcagcacctgcgccgcaagatctacgcgtgcaccgcctccgtaggcccgggggcggccaatatgctcaccgccgccgcgaccgccacggccaaccgtattccgttgctgttgttgcccggcgatgtctacgccagtcgccaacccgacccggtgttgcaacagatcgaacagttccacgacctgagcatcagcaccaacgatgcctttcgctccgtgagcaaatactgggaccgtatcaaccgccccgagcagttgatgagcgccgcgatccacgccatgcgcgtgctcaccgacccggctgaaaccggcgcggtgaccctggcattgccccaggacgtgcaggccgaggcctgggattatccggattacttcctgcaaaaacgtgtgcaccgtatcgaacggcgcccggccacccgcgcgatgatcggtgatgcagtggccgccttccggggcaagcgcaagccgctgatcatctgcggtggcggggtgaagtactcaggcgcgaatgccgcgctgcaagcctttgccgagcgctttgatattcctttcgccgaaacccaggcgggcaagagcgccgtggtctccagccatccgctgaacgtgggcggtattggcgaaaccggttgcctggcggccaacctgctggcgcccgaggccgacctgatcattggggtgggcacgcgttacaccgatttcaccacctcgtccaaatcgctgttcaagcacccggaggtgacgttccttaacctcaacatcagcccctgcgatgccttgaagcttgacggcgtgcaagtgctggctgacgcgcaggtagccctcgaagcattggcggatgccctcggcgattatcgctctggctggggtgggcaggtcgtcgaggccaaggcgcagttggacgccgaagtggaccgtgtgcaccaggtggaatacgacggcgacgcctttgtgcccgaggtcgacgaccgccttgaccgtggcgtgctgcgtgaattcatcgagctgaccggctcgtgcctgactcagagctgcgtactgggcgtgctcaaccagaccctggccgacgacgcgatcatcgtcgccgccgcgggcagcctgcccggcgacctgcaacgcgcctggcgcagcaagggtgtcaacacctaccacgtcgaatacggctattcgtgcatgggttacgagatcaacgcggcgctcggcgtgaaactcgccgagccgactaaagaggtgtacgccctggtcggcgatggctcctacatgatgctgcactcggagctggccacctcgatccaggagcggcgcaagatcaacgtggtgctgctcgacaacatggcgttcggctgcatcaacaacctgcagatcggcaatggcatggacagcttcggcactgaattccgctaccgcaaccctgagagcggcaagctcgacggtggcctggtgccggtggacttcgctatgagtgcggcggcctatggttgcaagacctacaaagtcagcacggtggagcaactcgaagcggcgctggcggatgcgcgcacgcaaacggtgtcgacgctgatcgatatcaaggtgctgcccaagaccatggtccacggctacctgtcgtggtggcgggtaggggtggcgcaagtgtccaccagcgaacgcacgaatgccgccgcgaaaaaactcaatgaacacctggcgaaggcccggcagtactaataacaagaggagtgtttgtatgtctttgaagctaggtgtcatcggtacaggcgctatcggccgggaccatatccgtcgttgcagccagaccttgctcaacagccaggtggtggcggtgactgacatcaacctggagcaggccgccaaggtcgtcgccgatttgaagctggacgctgaggtgtacgccgacggccatgcgttgatcaactcgccgcaggtcgaggccgtgctggtgacgtcctggggcccgagccacgaagaattcgtgctcgccgccatcgccgccggcaaaccggtgttctgcgaaaaacccctggcggtcaccgccgagggctgccgcaagattgttgacgccgaggtagcttacggcaagcgcctggtgcaggtcggcttcatgcggccgtatgacgaaggctatcgcgcactcaaggctgtgatcgacagcggccagatcggcgagccgctgatgctgcactgcgcgcaccgtaacccgacggtggtcgaaaactacaagaccgacatggcgatcaccgacaccctgatccacgagctggatgtgttgcgttggctgctcaacgatgactacgtgtcggtgcaggtggtgttcccgcgcaaatccagcaaggccctggcccacctgcgtgacccgcagatcgtgctgctggaaaccgccaagggcacgcgcatcgatgtggaagtgtttgtgaactgccagtacggctatgacatccagtgcgaagtggtgggtgagaccggtatcgccaagctgccggagccttcccaggtgcagatgcgcagtggcgcgaagctgtccaacgcgatcctgatggactggaaggatcggtttatcggcgcgtatgacgtggagttgcaggcgttcatcgacagcgtgcgcgccggacaggtgggtgggccgtcggcgtgggatggctttgcggcggcggtggcggcggatgcgtgtattgaagcgcagggcagtgagcagattgtgaaggtgagcttgccggatcgcccacgtttctacggctgaatcactgaagaaatgctgtgaaaaatgtgggagggggcttgcccccgatggcggtggatcagatagatattcattgactgacacactgtaatcgggggcaagccccctcccacagttgaatcgggttttcacttcaagcaaggagtgtaggtatgcgaatcggactagtcggctacggccatggagggcgcttctttcatgcgccgctgattgccacattggccggtgccacatttgtcggcgtggtcaccaggtctgcggaacgccgccagcaactggcaaccgaccacccaggcctcaaggccttcgactccatcggccagatcgtcgaagccggcgtcgatgccctggtcatctccaccaccctcaagggccgccccgcgctggtgcttgaggccatcgaacacggcgtagccgtggtcagcgacaaacccttcgccgccaacgccgaacaggcccaggccttgatcaccgccgctgaacgccagggctcgttgctcagcgtctaccagaaccggcgctgggactcggactacctgaccctgcgcaaactgatcgacgctggcgccctgggcacaatcacccgtttcgaatcccgcgtggaacgctacagcccgcaagccgtgggcaacgccagcggtggcggctggttgcgcgacctgggcagccacctgatcgatcaggccctgcaactgttcggcccggttgaccgggtgttcgcccaactgcactacaccgccgaacaccctacggtggaccatggcttctttgtctccctgacccatgccaacggcgtcatctcgcacctgtggggcaatgccctgcaaaacagccaggcgccacgctttcgtgtgagcggcacctccgggtgctacaccgttgaaggcctggacggccaggaagaggccttgatggccggcaagtcgccgaaaaccgaaggcgagcactggggggcggaagaacaccgacgctggggctggttcgaacaaggcccggaacgcgagcgggtgccgtcggagaagggctgctggacgcagttctatcggcagttgcaagtggctgtgcaagggcagggaccgctgccggtggacgcctatgatgcactggaaaccacccgtatattggacgccgcacgcctgagcgccgagcgccagcaggtggtttcaacaaaaatagaataaaattctaaaacaggttgatatggaaattattttccaataaagtcttttccaggttgcataaagtacgttcggactcgatccgcacgactcaacaaaaacaagatcaaaaacaaccaggtaccgtcagatgaaaatcttcaacgctgtactgcgagttttacaccctgcccacacgccacgcgatctgccccgcgcccggccgttttacttctccttccttaatgtgctgtgcgtcgaaaaccaaggcgcgctggtctgctgcattcccggcgcaccggtcgtgcggctgcctgccgagctctgataaacgcaacgtccaaaaaaccaacaagaaagtggagacagaccgttcatgaagaccccgatccgttttaccgcgctggccttgtccatgctgctcgccagcggtgttgccgcggctgccgatctgaagataggcgtgagtatgtccgccttcgatgacaccttcctcacctacctgcgcgaagacatggacaagcaagccaagtcctaccccaagggtgacggcgtgcagttgcagttcgaagatgcgcgtgccgacgtggtcaagcagttgagccaggtcgagaactttatcagccagaaagtcgacgcgatcatcgtcaacccggtggataccgcctcgaccgccaacatcatcaaggccgccaccgcagcgaaaatcccgctggtgttcgtcaaccgccgtcctgacagcccgaccctggcgccgggcgtcgcggcggtgacctccgacgacgtcgaggccggcaagttgcagatgcagtacatcgcagaaaaactcggcggcaagggcaacatcgtgatcctgctgggcgacctggcgaacaactccaccaccaaccgcaccaagggggtgaaggaagtcctgagcaagtacccaggcatcaagatcgagcaggaacagaccgggatctggctgcgtgacaagggcatgaccctggtcaacgactggctgacccagggccgtgaattcaacgcggtgttggccaacaacgatgaaatggccatcggcgcgtccatggcgctgaagtctgcgggcaagaagggcgtgttgatcgccggtgtcgacggcacgccagacggcttgaacgcgatcaccaagggtgacatgaccgtgtcggccttccaggatgccaagggccaggcggacaagtcggtagagaccgcgcgcaagatggccaagaacgagcccatcgagcagaacgtggtgatcccgttccagctgatcaccccggacaacgtcaaagacttcaagtagtccctacataacaacaataagccggcagggcggtcgtgcccgccttgccgatggagtacctccctatgctcgctcaagccgctgtctcgcagcctcccggtatccagccgctgccgctggacgaaccctacctgctggaaatcgtcaacatcagcaaaggctttcccggcgtcgtggccctggccgacgtgcagttgcgcgttcgccctggcacggtgctggcgctgatgggcgagaacggtgcgggcaagtcgacgctgatgaagatcatcgccggcatctaccagcctgacgccggcgagattcgcctgcgtggcaagccgattgtgtttgaaacccccctggcggcccagaaggccgggatcgcgatgatccaccaggaactcaacctgatgccgcacatgagcatcgccgagaacatctggatcggccgcgagcagctcaacagcctgcacatggtcaaccaccgcgaaatgcatcgttgcaccgccgagttgctggcgcgcctgcgtatcaacctggaccccgaggaacacgtgggtaacctgagcatcgccgaacggcagatggtcgaaattgccaaggccgtgtcctacgactccgacatcctgatcatggatgaaccgacctcggccattaccgagaaggaagtggcccatctgttttcgatcattgccgacctcaagtcccagggcaaaggcatcgtctacatcacgcacaaaatgaacgaagtgttcgccatcgccgatgaagtggcggtgttccgcgacggccagtacatcggcctgcagcgcgccgacagcatgaacagcgacagcctgatctcgatgatggtcggccgtgagctgagtcagctgttcccggtgcgcgagacgcccatcggcgatctgctgctgtcggtgcgcgacctgagcctggacggcgtgttcaaggacgtgtccttcgacctgcatgccggcgagatcctcggcatcgccggattgatgggctcgggccgcaccaacgtggccgaaaccattttcggcatcacccccagcagcagtggccagatcaccctggatggcaaggcggtacgcattaccgacccgcacatggccatcgagaaaggcttcgccctgttgaccgaggaccgcaagctcagtggcctgttcccgtgcctgtcggtgctggaaaacatggagatggcggtactgccgcactacaccggcaacggctttatccagcagaaagccctgcgggcgctgtgcgaagacatgtgcaagaagctgcgggtgaaaaccccctcccttgagcagtgcatcgataccttgtccggcggcaaccagcagaaggccttgctcgcacgctggctgatgaccaacccgcgcctgctgatcctcgatgaaccgacccggggcatcgacgtgggtgccaaggccgagatctaccgcctgatctcgttcctggccagtgaaggcatggcggtgatcatgatttcctccgagttgcctgaagtgctgggcatgagcgaccgggtcatggtgatgcacgagggcgaattgatgggcaccctggaccgcagcgatgcaacccaggaaaaagtcatgcagttggcctccgggatgaccgcagtccactgatgtacagaataaaaaggtgatgggctatgaacgcaataacggataacaaacctgcgacggtgccaaccaaaagtcgccgacgcatgcccaccgagctgagcatcttcctggtgctgatcggcattggcctggtgtttgaattgttcggctggatcgtgcgcgaccagagcttcctgatgaactcccagcgcctggtgctgatgatcctgcaagtgtcgatcatcggcttgctggcaatcggtgtgacccaggtgatcattaccacggggatcgacctgtcttcaggctcggtgctggcgctgtcggcgatgattgccgccagtttggcgcagacttccgacttttcccgggcggtgttccccagcctgaccgacttgccggtatggattccggtggcgatggggctgggtgtggggctgttggcgggggcgatcaacggcagcatcattgctgtcaccggcattccgccgttcattgccaccctgggcatgatggtttcggcccgtggcctggcgcgttactacaccgaaggccagccggtgagcatgctctcggactcgtacacggccatcggccatggcgcgatgccggtgatcatcttcctggtggtggcggtgatcttccacatcgccctgcgctacaccaagtacggcaagtacacctacgccatcggcggcaacatgcaggcagcgcgcacctcggggatcaatgtcaagcgccacctgatcattgtctacagcatcgccggtttgctcgcaggcctggccggcgtagtggcgtcggcacgtgccgcgaccgggcaggcgggcatgggcatgtcctatgaactggatgcgattgccgctgcggtcatcggcggtaccagcctggcgggcggggtagggcgcattaccggcacagtgatcggcgcgctgatcctcggggtgatggccagcgggtttacctttgtcggggtggatgcgtatatccaggacatcatcaagggcctgatcattgtggtagccgtggtcatcgaccaataccgcaacaagcgtaagctcaagcgctgattcaataccctgtcgaacacgggataaaatgtgggagcgggcttgctcgcgaaagcggtgtatcagtcaaagatgtgttgactggcagacggcattcgcgagcaagcccgctcccacatggggtctatcgctgacctgtgctaaccgtttgtcttctatatagctccacaacactgaatttcttgctataaacgcactccgataaccattcgccaagcccgtcctggtgccttttggggttatccgggaaaaaatgcctgtcatttcagttgctgcgccctcaagtcggccttagactgccgcccctcgtaaattgagtgccgggtggcgcttgaaatggacggcgcctttccgagacctgcagaggccttccggaacgctcccttattcgccttaatgcacgtattttttatagagaaatcaatgacaaaggaaaagttgctggccatgccggcggatgactacatgaatgccgaacagcacgcttttttcgagaagttgctgcaagacatgaaagtggaacaccacgagcgcattgaacagaaccgtatcgccattgaaagcctggataccccggccgacccggccgacgccgcttccgtggaagaagagcgtacctggctggtcaacgccatcgaccgcgaccagcgcatgctgccgcagcttgagcgcgcgttggagcgcatcaaggaagattcctttggctggtgtgatgacagcggtgagcctatcggcctcaagcgcctgctgatcagccccaccaccaagtactgcatcgaagcgcaagagcgccacgagcagatcgacaagcaccagcgccaagcctgatgcggtgaagctgggggaccgccacgcggttccccagggcaagacccgttacgccctgtctattgatctgctgcaagctaccccactaaaggcccatggataatggcccgatagtggcgtttaatgcagcgacaataatgacaagcagtggggtaacgaagatggctggagacggatctctgatgggcgcagctgtgtcaccgcaaccggtggtacgcgggctgcccggctggctcacgccgttgttgcagagcaccgccctggtgctggtactgctgggcctcgtgtttgccaacttgccgctctacctttgcctgccactggccgtgctggtgatctggctgcctcgcctgaaaaatcgtacgccggttattgcgccttccgacaccgccgatgccattggcgagttgacccgcgacctgtcctataccaccagccataacgcactctccgccgccggcgtggcctattcggtcaagcaactggcggcgcgcctgcagtcgcagttgagtgcggccaagcagatcgtcagcagtgccgaagtgatgatcggcactgagaaggtgacgtcccagctcagccgtgaggcattgagcgccgcgagccaggcccatcagcgcagcaccgaaggccgtgaagtgctggcccagtcgatcagccgcatgcaccagctcagccagcgtgcgaatgccagccgtgagctgatcgaagccttgagccagcgcagcgaggaaatccagcgcgtgaccctggtgatccagtccatcgccagccagaccaacctgctggcgctgaacgcggcgattgaggcggcgcgggccggtgaacatggtcgcgggtttgccgtggtggcggacgaagtgcgcgggctggccgggcgtaccgccacggccaccgatgaagtcggtgtgatggtggccgacatccagcaacgcactgcccaggtggtggagcagattcgccagctctcggcggacctgcacaccggtgtcgagcaggtagagcacgctggcgagcagctgcaaaatatcgccagcctggcggcggatgtggaaggccaggtcaatgaaattgcccagggcaccgacaccaaccgcacccagctcgatagcctgttccatgccgtggagcagatgcgcagcgacctcgccgtcagcgatcagcaaacccgccaactggccgacgcggctgtacaaatggaaggccaggccgaaaccatcagcgagcgtctggcggaagtcgggctggatgactaccaccagcgcatctatgacctggctcgcgaaggcgccagccgcattgccgcgcaattcgaggccgatgtgcagcagaaccgcatcagcctggatgacctgttcgaccgcagctacacgccgattgccaacaccagtccgagcaaataccacacccgcttcgacggttacaccgaccaggtgttgccggcgatccaggaggcgctgttgccgcgtcacgaagggttggtgttcgccattgcctgcacgccccagggctatgtgccgacgcacaacaaggcgttttcccaggcgctgaccggtgatgcgcaggtggacgctgtgcagaaccgcaccaagcgcaagttcgatgaccgtaccgggattcgctgcggcagccatcagcaggcggtgttgttgcaaacctatacccgcgacaccggtgagctgatgcacgatctgtcggtgccgatcatggtcaagggccggcattggggcggtttgcgcctgggttacaagcccgaggccgcgaaaggcgggcgttaggattattgcggtttatgcaagggagctattccggggatagctttttccaacagcaggaaaaccgtagcatggcgaacattgttagccagctaactaatgctgcggagaagttccatgcaaaacaaagtcgatgtcgccgtgatgattggcagtggtgtaccgcaagccttgcgggcattgggtcaaaaggcctgttgggtggtattgctcaatggagagcagcgcggtacggcgttcgccagtcgcgatgaggcggaggagtgcagggctgcctggcaggcgctgttgcggctggagcagtcagacagcctgcattgacggctgcttagtgcggttgatgcaggcgttggttcagctcatccaccgcaatcgcccattcggcgtcgtcacgcagttcttccttgagaaagctggcctgttgtgcggaccagaacggcgcatcgatcagtttcacatcttcgggcagcggatgggcgacgataaatgcgtcgatggcctccggggttgaatccaggcctaattgttcaaacagggtttcaagggtggggattggcgcgtccatttcgttctccatgcagggtggtcgttatgcatgggagggttgtagcgcagcggagttctatcgaatgttcaggaattcagggccccggcatccacagcagtctttaacgccttggcggcctcttttgcagcgacggcggctgcatcgacagttttgaaccagcggtctttttccacttggtgcgtggtcacagtggtcagcggtggcttggcccgcatcacgatcactgcttgaaactcaccatctacttcccttgcgtcgccatggatgaaaaattcgccgatatcaaattccgtcacgtagagccttcccttggagataactgcactggagaaacctggcccgtggggcgcaaacttcagtggacgggccagtatggcagttgttgcgggtcggcggcgcagtaaagttaccgggcggacgaaacgattgctccgtggggggcgtgcaacatggcttccagttttctggccagttcacaggccttgacatggtcgctgcgaaagcctttgatgcggccgctgagcacttcgcgcacgtggaagaagttccggccggcaggtacgacttggtaaagaaccgaatccgggtacccctcgaagctgttcaagcggtagtattgagcctcgtcctgacaggatgaacgggtttgcgaagacatagcgctgtagggtgatcgttgcatggcctgctccttttcgatctggcgggatgactggattgcagcgttttgactggttttgatcggtgctgctgttttagtattgtcgtcagcagtcagcgtccggttccatgacagcgtattcatttgtgtatgcatgtcggaaaactgcatttttaatcgggttattctctgaagttggtcgacccgtattctcgggccgttgaacctgtgatctcctgtggcgcctgatgaccttgcacaaggcccatcgagcatgtctgtactagtctttcggctcgacagcaggattttcttcagttttttcaaagaatgagttgtgtgatcgtgccgtgatggccgtttttttgtgctgcccgctctggcggacagcgctctttccatgtgggggcgtttccttggcagtcagtaatctggatatgcacgcgttattcgtgctgggtgatttgcgcgcaaagttggtcaaacagttccaatcccgttttgtttatattaccgagcagacgccggaaggcatctacattgccgaaatcgataccgaggcggcgatggtggtggatgacaaaccgcgccttgagctcaaggtcggcgaccatttccgggcggcggtattgcccagtcgtgagggcggcaagttcgaattgaagttccgcgatatcaagttgacggtctatggcctgggcgactacgcctttgtgtcctcggccgaaggccagggcatcgtgttcaaggaaggccacagcgtgatgctggtgttcgccgccaacgagcaactgcaggaaggcctgaccaaaaccctgaaggccgtgaccggcaaggccgccaaatggcgcaaaggcgaactggtcaccttcaaggccagtgaataatcagcaaaaaccgcgaacacccgttatctcccggaacctctactacagttgagttgacttaactattcagaggcttcgcgcatacgtagcaaagccgtccgccattggctgcgatatcgcgaggtgcgaaggcatgaaaggattgagaacgctgttggctgcgtcgctgacgagcctggggctgtctatggccacgttgccagtgaacgccgccgaggcgccgatacattttgccgacctgaactgggaaagcggcagcctgatcaccgaagtgctgcgggtgattgtcgagaagggctacgacctgcccaccgataccttgcccggcaccaccatcaccctggaaaccgccctggcaaagaacgacatccaggtgatcggtgaagagtgggccggccgcagcccggtgtgggtcaaggccgaggccgaaggcaaagtggtgggcctgggtgacacggtcaaaggcgcgaccgaaggctggtgggtgccggaatacgtggtcaagggtgaccccgccaaaggtatcaagcccctggcgccggacctcaagagtgtgaaggacctggcgcgctacaaggacgtgttcaaggacccggaatcccccggcaaggggcgctttctcaacagccccatcggctggacctcggaagtggtcaacaaacagaagctcaaggcctacggcctggatgacagctacgtgaatttccgcagtggttcgggcgcggcactggatgccgagatcgcctcgtcgatccgccgcggcaagccggtgctgttctattactggtcgccgacgccgctgatggggcgttacaagttgatccagctggaagagccgccgtttgatgccgaggcatggaagaccctgaccgatgcggataaccctgatccgaagccgacccggtcgttggcgtcgaagttgagtatcggggtatcgacgccgttccagaaagatcatccgcagattgcgcagttcttcgagaaagtcgagtttccgattgagccgttgaacaaggcgctggcgactatgagcgaaaaccacacggcaccacgggaggtggcccaggcgtttcttaaggagcatcccgaagtgtggaaggcttggttgactgaggatgtggcgcagaaggttgaggcgagcctgaaataaccacggatctttcagttcaatgcaaatcaagggtgggagggagcttgctcccgattgcagcgtatcagtcacggcatggtcgactgattcaccgctatcgggagcaagccccctcccacatttagttgcattccaggatcagaaccgggtctgtaccgccaactcaaaggttcgtggtgagcccaagtaatacgccggcgacacatgggcaaactcggcatacacctcattcgtcaagttgcgcacacggcccgtcaccgaggtgtgtgagtccaccttatagcgcaggaacgttccgaacagcgtgtaggccggcactgtctgggtgttggcgttgtccgcatacacctcggctacatatcgggcgtccacgcccccttgccaatcctcggcaaaatcataggtcagccacagattccccacgcgcttgggtacgttggttggcgtgttgcccttgcgcgacaccactgcgccactggcgattttctcgttgaagtcatcgtattcggcgtccacccaggcgaaattgccttccgccagcaactttggcgtgatgcgcagcgagctggccaattcgatccccttggatgactgtgcgccgaccggaatgctgttggtgggatcctgcgggtcggtgacggcaaagtccttgcgctcgatcttatacgcggcaacggtggccgaaccacggccgtccaggtaatcgaatttgctgcccacttcccactgcttgcccgtcgagacatcaaacacttgcgtggtggtatttggctgctcggcggctgtgctgtattgcacatacacattggccgtcgggatgaactggtaggtcaggcccacgcgtccggtcaccggctcccagctgcgtttgaagtggcgggggttggtggcggttattgcgcgatgattggtgacgtccaggtcgatggcgtcataacgcaggccggtcaacagcgacaatttgtcggtaagacccaggcgattctccacgaacaatgccttggtggtgacagcgttggtcttgtccttgccgaagctttcccgggtccgcgggaggtcaaagaagtgtccggggtcaaagttgttggggtctaccgtgctgttgccgggtacgttccacggtgtattggtggtgctgttgaccttgtactcgaagccgccggaccaggtagttgacaggccgaagaggctatcgtcgtggcgcagctcgaactggttgccgttctgttcaccttgatggcgcacctgataggccgtcgaacggtttaccgccgtgttgttcgcgttgtactgataggtttcaaggttgcggtaatcgcgttggctgtccaagtggtaaagggtgtttttcagggtggtgctgtcgttgaggcggtagtcgatgatcgaacgcgcccagagggtgcgctgttcgtagcgcccgtcggcgacgttgtagttgttgaaacggttgtgtttgtcgatcttcaactcgcccgccttggggttgagcaccggcgtgccccagtaggggctgtcttcatgctcatcctgatattccagcgccagggtgtgggacaggttgggcgtgaggtcgctgagcaaggaaaacgccaggctccaggcgtcgcgctgatcgcggtcgatgtagctgtggttggtgttgcggctcacatccaggcgggcgtaatgctgcacctcggcgccaggttcggtcagggcatggttgacgccgaaggccatgccggcggtgtcgtagctgccgtaggtgagctggccttcggcggcttgttcctcgcgggtggccagcttggtcacgtagttgagcgagccgcccacggagcctgcgccgttgatcagcgaggaggggccacccaccagctccacccggtcatagatccatgcatccacggggcgggccagaccagtggcgacattgatgccgttgaacatctgggtgatctggctgctggtaaaaccgcgataggagacaaacccgccaaaccccggcggggcgctggcgttgacgccgggcaaggtgttggcggcatcgcgaaaggttttggcgccatggcgctcgatgtcattgcgattggcgatggccaccgacgccggggtttcccgcacactcaagcccaaccgcgacgctacgccgctggattgatccagggccaggccgggttcggcggcttgttcgccatcgatggtggtcggggccaactcaagggcccaggcgcagacaggcaggcagccgaacaggcctgccaacaggggtagatgtttcatggttgaatcctgaaaagcttgcttgaaaacaacgcacaggcgcccgtacttccttgcggaaacggtgctcagtgcagatcggaaagcgaaggcatcaggtgaaggcaggcggcgcgcgcggattagccgcaggccaggtgaagcgggcagggatgtcggcagccaggacaatggcaggcggtggtgcttggggctgtggcaacaccgccacattcaggctggaactcagcgccgggcccatgccgccggtggaacacagcgggcaaccaaacgccttggacagcgtcggtaaattctcttcagtggaattcgacggcttgggcgcctgggtacgcgggtccaccgtacagaactggccgccgatgccattgagctgcatcccgaccatctgcccatgcccgatactgcaggcgaacacattgaacaggacgcagcagtagagcatccaggcaatgagcgagcggtcggcacgggcaagtttcatggggcggcactttaccatcagccgccgacgaaatgcctgcaaaaaatctcagggcgactatcctgtttcgcaccttttcagggagagccagccatgagctttgttgtcgcacgatggattgtcggggtttttacctgcatcagcatggtccacctgtactgggccgccggcggcaaactcggcttccaggccgccattccccaactgcccggcgaattcgccaacgggcccagacctgcattcaaaccctcggcattgggcacgttcctggtggcgatggggttggtggccattgcgctgttggtgtgcctgcgcgccgggctctacttctcggcggtgtcccacggggcgttgcagtggggcatcagcgcgattgccgtactgatgtttgcccgggcaattggggattcggagctggtggggttcttcaagaaggtcggtgggtcgaggtttgcgcggtgggatacgtatttttattcgccgttgtgtctggtgttgggggtggggttgttggtggtggcgtgggggtgaaaggggactaatgcagggtttgtaaaattctagaagaagaaaaacaggcctgttctgtttttgatcgcaagggtgtttaaagcaattattttgctcatagtagatgagttttcgtgcgtcaaatggttgttgaggatctctaaggttttggtgagctcctcaacgttgtaaatggcttcgtcttcgtaatcgtcgatgatttttccaagcgtggtgtttatcgcttcaagcacgccggactcaataagttgtccgtactcttcgcgggtaaggataacgctttcgagtaaagattctgggcattcgtctacgtctaataaactcatggcctctaaggtgagtggggtgcagattactttcattttttgtgtgcctttttattaaagtgtgtcgcttcattgtattcgctttgcgttctaccgatttgctttcctgagggagatatcctgttgttaggaaccacgccctcaaggctcaagtagcgccttttacccggctgtgatgggtcatggattctgaagtagtccccgttgaggtcttctacaatttcaatcccattttcagggttcttgtagatcttcttgcctttgtctgtcgtcgtcacgattgggtgagtgccggtaaacttgacaatgttttcatctaagcttgctacctcccactttgaggagtacttggctgcgcgctcagctcccccagttttaggaagttcagcttcccctgggtgcacttgtgctgacttaaccggatccttagcacttacctcttccctgcacccgttatctccagggcagttattcaaccccaacggatcaatccatcccgttgggtttggcacgtacaggtacacgttgatcccacccgccaacttcaccgggtccggcgtcaggtagcgaccaacatccggattgtagtagcgatggcggttgtagtgcagcccactttccggatcgaagtattggccctggaaacgcagtgggttgtcgacttttcctatatcgaggcgggttatttcgccgtaggcgcggtaatgcgcggaccagacgatttcgccgtcttgggcagtgagttcctgcggggtgccgaggtggtcaagttggtagtggtaggccttggtttcctttggaccgaaaccttccaacagcgccagcgggcgaaagctgtccggttcgtagaggtagctgcggtgccgatccgcgtggtgttcggcgatgagtttgtcgccttgccagaagaattcggtcgtaatcccatctacggttttactgatacgccgcccaaacgggtcgtagcggtagctggcgatctggccgtcaggtcgggtaatgccgatcagacgatgctggcagtcgtagcggtattcggtgacgagtgcgtggcccttgccactccgttcgcgaatcaggttgccgaaggcgtcatagtcgtagtggtggtcgccctggatcatcaggcggttgccggcgacgatgtcggggccggggcggttgtgcatcagcaggttgctggcggggtcgtggccgaagcgttcttgctcgccttgggtgtggtcggcgcgggtgaggcggttgagtgggtcgtagtggtagcggtgttcgcccttgcgggtgtcgagcaggcgggtgaggtttccggatttgtcgtagtcgtagtggcggcggtatagcgggccttcggcatcaacgatgctctggttgaacaggcggccctggtggtcatgttggtagtggctgaacagttggccttgttggcgttgctgttcgcgaccggccttgaacaggtgtgaggtgagtaccgcgccgttcagttcgacggtggcgaggtggccgcctttgtcgtgattgaaggtgaggcggttgttgtccggcaggcgcaggttttgcagctggccgcaggcgtcgtaggcgtagcgcagggtgccccagccttggtgttcggcggtgaggcggttttggctgtcgtactcgtaggccagggcccagtggccgtcttcgacacttaggagattgccctggcggtcgtaggcgtaatcgacggtattgccatcgggtagggtttttctgatgaggcgtccggcatggtcgcgctcgtagcgggtaaccagctgactgccgtcatcgccgtgttcggtcttttcccgaaggttgccgttgaggtcgtacacgtacgccgtgcgctgaccgtcaaacccggtttcctgctggatcaggccgttgctgtggtactggagccggtaggtctcgccaacctcgttttcgatctcggtcagcaacaagcgcgcattgtcgtatcggtagttgacctgggtgccatcggcattgatgcgacgactgatcaggtgcaggccgtcggcgtattcgtagcgggtgatgtgcccgagttcatcgcgctcggcggtgatttttccgtaggggttgtagctgtattccttgaacccgtcgcctggcagcacaacgcgaatcaaccgacctacgttgtcccactgatactgggtcagcgcgccgtgttcatcttcccgtgcaatctgtcgccccagatcgtcatagcgataacgcttgatcccaccattgggcaactgctcctcaagcaactgcccacgctcattccacaccagccgctgacagctgtggtccgggtaccaaaccccaaccagttgcccatatttgttgtagctgtagtcagtcacatgaccgtcaggatcgatcttgcgcgttacatcgccctgaccgttgcgctcatacttccaaaccgcctgaccccgccttacaacgcgtacgaagccgttgtcatgctcgtaggtcgtcggctcatcgtcccccggaaacaccgccaccaagcgcccggcttcgtcgtactgatacgccgtgatcgccccgagcgggtcctgctcaaccgtcagccggcctctgtcatcgtaggatttgaagtgctcggcgccatccggatccactcgctgcaccagccgcgcccgctggtcatgcacgtagacttcctggctgccatcggcgttaaacaccgtgacctggccgttgtcatcccaggcataacgcgtgtccatctgcgagaaactggcccaatgccgaatgcaccgcgccgccttgccagcccgttcccattcccagaagaaactcgccccaccggccaagccgcgctcaagaatgacgtgctgttcgtcgtagcgataaacctcgctttcaccgacggcattggtcgctgaaaccagtcgtcccaagtcgtcatatgcgtaggaaacaaccgtctgctccgtcacccacacaaacggaccgtcatccacaacgcgatgaatctggtaatccaccgccacaatccggcccgacacatagcgcaaacacaacgaacgcccgacaccgttatccacccgctcaatgcgccccagaaaatcccgagaaatacgcagccggttgtcatacgcatcgctgatcgctgtcagcacaccgtcgcggaagtggtagaaacgtgacgcctgcgccagcaccagttcatcgggcgcagcacccaaatagatcgccgcttcggccaggctattggtgatcgcaggtcgagaggcagtaggcaagggcagggtggtcgaccgattctcatgatcggtccaaaccaccgaatcaccctcaaccaccagccgatgcgccagcgagtgactccagccaaaccccagcccgcaatccatttccaccgcactggtgcggtacaagcgagtccactcaaccggcaagaccccgtccagcgtgccatcggtaagggtcagcaactcctcgccggtgaccatcgacaccgggcagccgttggtggcggtcttgtccgaagatgccgccgcatccccattgggattgcgagcagaagccggcacatcatccacatgctcttgctgcttcagcaccgcgttctgccgcgccttccagcgcatctgcatcgtgccttgcttgagcccgccgaccaccccgcgaaccgccaccgccttgtagcgatccaccgcctgcatgaacttggtcagaatcgccaacaggcccttaacaaaacccaccgccgcctcaacaatccgcgctccatacttgaccaaccgcaagctcaaatacgccacacccgccgccggcaaggcgatggtcaatacggcgccaatcaccaggtcaatcagcagcgacaccacaaaccctgctgctacctcggccatctcaccgggcggtaatgcgtccagccagagcatcgccgtacgtaccatcaggtacagcgctgcctcgtcactggcgagcaacatcgcctgttccatgaccttcggcgtgtcggtggcgatttgcgccaacctggcggcctgctcacccaactgctcaacgaacgccaacgggtcttcaagaattgcctgcaccagcttgatgctgtcccacacgtcgcgaatcgccgcccaactgcccgccaataaaccgctgccaattgcactggcggtcgagcgctcccaatgcggtttaaagccagaccactgctcccgaagccactgctccaaatccctggtcaacccggcgtaagaggcaaataacgcgtcaacctgttcctcggacacgccaccctgcacccgcacctgatagcgcccgcccgccgcacagtggtgcgagcccttgccctgttcatccagcatgaccaccgtggaactgccgtcatccaggccgatgacctccactgggatattgccgattggcacgtcatacaccgactcgaacttgctctcgatcttcaactcaccgcccatcgcgcagcgggtcacgctcgaaaagtcagcgtcggaaacgcttaccgaacgctgcgaatcccccacccgcaacacccgatccatccccagcaacgacggcaagtctgccgcatgactcagcgaatccagcgcacgcgaataccaggcgttcatctgctggcgataactcaccaggctctgatgaaagccgtccagttccatttcgatcagggcaatgtgggaagcgttggtcatccgtgacgtctcggcaaagggcaagacgtcggagcatgccccagcaaaaagcggctggatgaacggttggaaaattcagaaagagcccactgcgctgggggaaaaaccgcgaaaaatcagctcgaagtgctacaccgaaaagcgataaacctgattgcagaattgcccgccaaataaaaatcgctcgcatccttgcccgattccccgacatggccgtcatggttaatagaacctcccttacgcaggatttcccatgtcgcgccttgctcgtcccttgcacccactggccctgtcagtggcgatggcttttgccgccgtgccgttgctgaccgtccagtcctcctatgccgaagagagcagcagcgcgttgcgccgtttctcgatccctgccggtgacctgagtcaggcgctcaacaacctcgccgaacaggcgggcctggtgctggccttcgatgcaggcctgacccgaggcaaacgcagcaaggggttgagcgggcaatacgacaccgacgtggcactgaaccaattgctcgccggcagtggcttgcaagccttgaagatctccgccgaccgctaccgccttgaaaccatcccggataacggcggcgccatggagctgcaggccaccaccatcagtggcgcgtaccatagcgaaagcccgaccgggccggtggccggttatgtggccacgcgcagtttgtcggggaccaagaccgacactgcgctgatcgaaaccccgcagtcgatttccatcgtcaccaaagaccagatgcgcgcgcaaaacgccgagagcctcaaccagatcctgcgctacagcgccgccgtcatcccggaaacccgtggcgccactgcgtcgcgccttgaccaactgactatccgcggtttctccccggccacttacctcgatggcctgcgcatgccgtcgagccgtgacgccctgccgcagaaagacgcctttgacctggagcgcgtggaagtgctgcgcggcccggcgtcggtgctgtacggccagggcacgccgagcggggtgatcaacatggtcagcaagcgcccgttggatacgccgtttcatgaagtcggcgtggaatacggcaccttcaacaagaagcgcaccaccttcgacttgagcggcccgctggatgatcagggcgtgtattcctaccgcgtggccgggcttttcgacgatgccgatgggcaggtggagcacaccgagacgcgtcgtcagtcattgtccagcgcctttacctggcgcccggacgacgccacttcgctgaccctgctcgggcatttccagaaggaccccaagggggcgtcctatggctcggtgccggcctggggctcggtactgcacagcccgacagggcgcagcatcgatgtggatttctacgatggcgaaaagaatttcgagaaaagcgaccgcgagtactactccatcggctgggcgttcgagcatcacttcgatgacgtatggaccgtgcgccagaatgcacgttacctgcgcagcgaaggccagtaccgcagcctctacagcaactacctgatggcggattaccgcaccatccgccgctcgaccatcgccagcgatgtcgacctggatgcctacaccctcgacaaccagctgcaggccaaattcgacaccggcccgttgcagcacactttgttgatggggctcgactaccagaacaccagcaccgacaccaagtccggttccggcgtgtacactgcaggcccgaccctggatattttcaacccggtctatggcgcggctgtcccggtgccggcctacaccaccgacggcacttcgcgcagcgaacagaccggggtgtacctgcaagagcagatgaagtgggataagtgggtgctgttgctgggcggtcgctatgactgggccagcaccgataacagtacccagaccatcagcacgggggccaagagcaagtcgtccctggacagcaaggcgtttaccggtcgtatcggcctggtctacctctttgacaatggcctggcgccgtatgcgagttatgcggagtcgttcaacccgcaatcgggcaccggctacggcggttcggtgttcaagccgaccgaaggcaagcagtacgaaatcggcatcaagtaccagccgccgggcagcaacagctttatcaccgcggccatcttcgacctgcgccagaccaacgtgctcaccaccgacccggaccccacccacctgtgcggcaccgggcgctgccagagccaggacggcgaagtgcaatcccgtggcttcgagctggaaggcaaggccagcctcaacgataacctcgacatcacagcggcctacgcgtacctggacaaccgcatcagcaaatccaacaacactgtgcgctatgcgcccatcagcgatatcggcgtaggcccggccatcgccgccgaaggcaccaccacctacggcgtgccgcgccacaccgcctcggcgtgggctgactacaccttccacgacggccacctcaagggcttcggcgcgggtgcgggcgcgcgttatgtcgggtcttcctggggcgatacagccaacaccctcaaggtgccgggctacaccttgttcgatgcggcggtgcactacgacatccccaacattaccagcctgaaggacaacctgcgcctggcgctcaacgccaccaacctggcgaataaagagtatgtcgcgtcctgctactcctattcgtggtgctggtatggctcgcagcgcacggtgcaggcgagtgcaacctatcagtggtgataaggcaatttaatggcccccttgtaaccaaatcctcgccagaatcgcttttattttcaggtggttaggcgaggatgcaaatgcgcactgttggaatcatgctgatcgcctgctccctggccggcggcgcggctgccgtgcaggcacgggagttgcgcgaaggtgacaagtacatgtgcagttggggcgccggcacggccgccagggctcaggagttgaaactgtcgggggtgtcgctgtatgcggcgcgacagaagatccagagcatgaagttcaacaaatcctggatgcgcatgatggccatgggcatcaccgaacagacctacgacagccgttcgcggctcaagcccgaggccattcgccagggtttctatcaggattgcgtgcgctacaaggtcgcacgcaaatgatcgagcaagcaccggccagtacaaaatctgcgtaagcctgtccaacttttcctcggcggccctggccatactggcgccaggtaaacccgaggcacaggccatgactgactacgtattcacccccgcgccaaccccaaccctcgcagtccaaggcagtgatgcgcgcttcccgctgcgccgtgtgttctgcgtgggccgcaactacagtgagcatgcgcgtgagatgggtcacgacccggaccgcgagccgccctttttctttatgaaaccggcggacgccgtggtacccgccgaaggggtgatcgcctacccaccgctgaccgccgacctgcaccacgaagtggaactggtggtggccatcggcaaggacggagtggatatcgccccggaacaggcgttttcccacatctgggggtatggcgtcggcgtcgacctgacccgccgcgacctgcaagcccaggcgaaaaaactctcgcggccgtgggagtgggccaaggcgtttgatgcgtctgcgccgagcaccgcattgcgctcggtgagcgcggtagggcatccgtccagcggaaaaatctggcttgacgtcaatggcgaacagcgccaggtgggcgacctggccgaccagatctggtctgtcagcgaagtgatcagccatgcctcaaggtctgtcgcgctgaaggttggcgacctgatcttcacgggcaccccggcaggtgtcggtgccttgcagccgggcgatgtggtcacggcgggcatcgagggcatcggcgagttgcagttcaccctcggccaggcttgaggctaaagtggtgacccggccacccgagagaccgttatgccaggcacccgcgtcaccacctacggcatggaacaacgcagcgaccgccccgacttctacatccgtgacaagcgcgggcgggcgccgctgacccgcccgcatcggcatgaatacttccagatccagatcaaccttggcggcgacaccgtgcagcacatcggcggcgcggtgcggccgtttccgcgcaaggccctggcctttatcctgccccatcgcctgcatgtgattccccatcccgaagacggcgagttcatgctgatcaacttcagccagggctttttcctgccgcaactgacctgcgcccccctggacctcgaagacattcccatcggccaggcgcccgagctgtcgccgtttcgcttccaggaacacctggatttcatcctcgatgacgcagcatttgagcaggtgcaaagctggctcactcacatgcgcgaactggatgcccaccgcaccttcggcacccgcgaacgtctcaagggttacctgtttcaaatgatcggcctggtctgcgaacaatatgccgagccgttgcaggcgttcgccgccgataatgccacccggcgcgggcgcaaggatgcgttggcgcgggtgcagcgctacatccgcgagcatctgcacgagccgaccctcaaccttaccgacacggcagcggcggcgttcctgtcacccaactacctcacgcacctgttacgcaaggagaccggcaaacccttctcgcaactggtgctcgaccgccgcttgctattgacgcgcaccttgttgctcaacagtgcgcagatgatcggccccattgcacaccgctgcgggtttaccgatgaagcgtacttttcccgttgcttccgcaaggcccatggcctggcgccagggcaatttcgtcggcagcagcatggcgagtccttttaggcggcggtttacaaatccacgacaatcgctatgtttctatttgcatacaattgcgtccttcattgggaggccagtatgcaaacgcttatccgcgcagcgacgcaggacgatgtcgacacgctcttcacccttcgcacctcggtggtgcaaaaccatctgagtgtcgagcagatggccgagttgggcatcaccccagaggtgctggccgacagcatccgcgaagccccctgcgtatggatcgccgaagtggatggccggcccgtggccttcagcatggtcgacctggcgaccggcgaggtgttcgcgatgttcgtattgccgtcccacgagaacctggggctggggcgtcgactcatggcggtggctgaagccgcgctgtttgcacaccatgacaggttgtttctgatcaccgatgggcgcgacgaaatccgcgccaacgggttttaccaacgcctgggctggaccctgacggcgcaggtcgaggacggcgacgtgcgttatgagaagagcagggcgcagtgagccatgagtccacccgagccgccgtccaacaactttcgctacttcgtgttcgcagtgcttggcgcggcggtgttgctgggggtctattttgtgcagctcaatgcccaggtcgaccgcgagcgggatgcgaccaatgagcgcttggcgctgtgtcgacaggtggaaagtgtggcgcgctcggtgttgcccaatagcctcgatacacaagatgcctgcgaacagttgagcgagcgtatatcgaaaagtgtgacgtcgccttaactcattaacccttttttatcagtggaaatagtgccagtagttgcaccaaaaagtggcatttatagggttggctaccttaaaaaacgtgtggttattgaatgacttacagcgcttttaatccgacgaaaggattaaaataatcttgttacagctttttacaatcgttactatagccgggcgtttacctcccacggtttatgcatttttaaatcccaagtttccatcagctacttgggattttttttgcttggaatttgaccttcgcgtcaaacttcaccgtcggcgaactccgcgcgcatccggccattacgcttggcctggtacagcaacttgtcgacctcttcgacgaaccccagcatcggcgcatcaggtttcacgatacgtgtacccacgcccaggctcagggtcagcaggctcgataccgccgaataaccatgctcgatctgttgctggcggatcaggtgcagacagcgttgcgccacctgcctggccgattgcgcatcggtttccggcagcaaccacacgaactcctcgccaccgatacgtgcaatgaaatcccgtggccgattggctgcctgggacaaggtgtgcgccacctggcgcaggcactcatcgcccttgatatggccgtagtggtcgttgtactgcttgaagaaatcgatatccagaatgatcaacgacagcggcaactggctgcgctgggcgctggcccattcccgttccagcacggtgtcgaacatgcggcgattggcgataccggtcagaccatcttggtaggaatattcctcaagttgtttctgcaagcgcaccaggtgctcttcggtcttcttgcgctcgctgatatcgaacatgaaaccgatcagcgcctcgacctcgccgtccttacgcaccacgtgcaccacatcgcggatccacacgtagtcgccattcacgctcagcgcccggtagtctgcctcgtgatccacaccggcgcgggactgcgatacgcagaaattcaccacgtattcacggtcgtccgggtgcatgcgctcgacccagtcgtccacactgacccagctttgcggggtccagccgagcaacgtctcgatctgcgggccgatgtaactgaaggtcatgctctgccaatcaatgcgccaggggatggccttggtcgactccagcaaggttttgtacacatcgctgtcgggctggctcggagggtcgatgctcatggggcggctgctctggatgatggcgaaaagccaagagcgtctttcgatcggggcgcttagtcaagccttcggcggcgcagcagacgagaggtcgccaaacgggtttctggcgccagcgggccggcgtttccacaccgaaatgaggcatggctaacacttttgcacgaaccgctccatgccccgcagaacctcgtctactctggttccatcacaacaaccgggtgaggcccaggggtggggacttgtcatgatttcaatcattgaattcaaccgcatcatggcttcgggtttcctgccgctggcgtgcgattgcaccttgaacagcgacggctcgttgcgaatcactgtcttcgaaccggtgtccggccgggtcgacctgctgctgaccggggtatcccccgacggtttggacagcatccgttccatctcaaacctgattggtgagttgcgtaccgagatcaaggccgggcgtcgcgggtttgctgcggtgggttagccgttgacggtgtgggtgggagtatccagcgcgccgtaatagcgccagcagcaatggcgatgttccggcacgatcacgcagccgctgaggctgacgatcagcagtgcggcaaccagcatgtaaagtcggcggtacatggtgtttcctcttgggttgatcagcgttaatccttcaacgcagtcaccgacataaatccgtcgcgaagctttcaaacatttcatcaagccctgccaccccctgcgcaatactgctgaaaaacctgcgacggattttcctgcccccgccgttcaacccatcagcacccgcactttcgcgtgttgcatgaaggagttgccatgagatacctggccaaattgcgctatgccttgcttgctccgctggcccttgctgcgtttgtcagcacccccgtgtttgcccagaccgaaatcattatccgccagccaccgccgccggaacgtgtggaagtgatccctgtggaacgcccgggttacgcctgggaccgcggccactggcgctgggaagggcgcggctacgcttgggtgcccggtcactggcagccggtgatgcgcaatgcgcgctgggaaccgggccattgggaggctcacggccctaattggtactggcgcgaagggcattggatccgctgaccgagaattgcccgattgaaagacactgatccggacgtggaactgctggcgcgcatcggtaacaacgagcctgcggctgtcaacgaaatggtgacgcgcaaactgccgcgtctgctggcgctcgccggccggatcctgggggatgccgacgaggccaaggacgtggcccaggaaagcttcctgcgcatctggcgccatgcggccagttggcgcagtggcgaggcgcgcttcgacacctggctgcaccgggtggcgctcaacctgtgccacgaccgtctgcgccggcgcaaggagcgcccgttggaggacgaggaagcgttggcgctgacagacagcgcactgacgccggatgaacagctggaagccgccgaccgcagcgcccggatggctgccgccctggcggcgctgcccgagcgtcagcgcgaagcgattgtgttgcagtactaccaggagctgtcgaacatcgacgccgcggccctgatgaacatcagcgtcgaggcactggagagcctgctgtcgcgggcccgacgccagttgcgcagccaacttgccgacacacccgggcttgcccgcccaggaaggggaaaaccatgacacccgaacgctttgcttacctggccgacgcctatggcgccgacctgcaccgctggccccgcgccgaacagcccgcagcccaggctttgctggacagcggcaatgtgcttgcgcatgaggcccagcaacaggcgcgctggctcgacggtcaactggacagccatcaactggcctacgtcgatccttcgctggcacggcagattcggctgtcggccccgcgcggccagtcattctggtcgcgctatgcccgctggttgtcgccggccggcctggtaggcgtgggtgtcgcgggcatcgtcaccgggatgctcgtggcctccctgagcgtgccgctgccgatgtggtcgtccgaggtgttgcccagcgtcttcgatcaaggcgatgcgcaagtcatctttaccgtcaatgccgaggacaccgagcaatgagcctgaagtccctcaaaccctggctgctggcctcggtcttgctcaacgtgttcctgatcggcggcgtcggcggtggcctctaccactggatggccagtgccaagcccgctgaggcggtggtcaaccagcacggcttgcgccaggcgatgatcaagctgccgccggagcgccgccgggaattgcgccaactgctgcggcacaaccgggccgacagccagccgctgatcatggccgggcgtgaagcgcgcatgggcgtgatcaagcaattggaagcgccgaccctggatcgggatgtgctggtggcggaactggccaaggcccgtgaagccgatatggcgctgcgtgcgttggtggacacgacgttggcgcagttcgccagcaccctgcctcgggaggagcggcagaagttagtggaggcgttgtatctgcgggggcaggcggcaggccgcaagccttagtcctgaacgtggcgcttgtaggtctgcgcccggagcgctgaactacaggcgacgcagaaaggatttgacgatgtggcgggtggcatcggtggtgtccaactcgtccatggcgccataggggtgccactggcaatcgacgatttcattgcaaggtttcgcatcggcgacgttcaccaccgacgcttcgaacacgtggtgcacggtgtcgcgggccttgagttcctgcaaatacagcaagccgtccacgttcaatccggtttcttcttccagctcgcgctcggccgcgccgaccgggcgctcgttgcgttcgaccttgcctcccggcaatgcccatttggatctggccttgcgcacgaagaggatatgcccctcgtgttcgcaaatgaccgttgcacgtattttcatcgtctgtgccccgcagcgggatgagtgtcataaaagtgtaatgcaattgtcatgctgagtgcttatggcgctgacgtgtggggatgtggatactgcccgattgatcaaaacgcacgaggagggcagatgagcaccgtacgctggggcatgatcggctgtggcagtgtcactgaattgaagagtggaccggctttctacaaagcgccaggttctgcgctggtggccgtgatggggcgccgcgaagcggcggtgcgtgattatgcggcacgccatggcattgcgcgtttctacaccgacgcccaggcgctgatcaacgaccccgaggtggacgcggtgtacatcgccacgccgccggacagccatctcgaatatagcctgatggtcgcggcggccggcaagcattgctgcgtcgagaagcccatgtcgctcaacgccgagcagagcgcgttgatgcagcgcaccttcgagcgtgccgggctgcatctgtttgtgtcctattaccgccgttcgctgccgcgtttccagcaagtgcgtgactggctgcgggaaggacgcatcggcgaactgcgccacctcacctggaccctgtgcaagccaccgggcgccaatgatgccagcgccgccaactggcgcaccgacccggccatcgctggcggtggttactttgccgacctggccagccatggttttgacctgttccagtacctcgccggggacatcgtcgaggtctcgggctttaccgcgcgacaagccggggggtatgcggccgaggatgcggtgacggcgtgctggacgttcagttcgggcgcactgggcatgggctgctggaattttgtcgcggaccgtcgcgaggaccgggtggaactgatcggcagccgtgggcgcatccgattctcggtctttgaagaccagccgctgcaccttgagggtgaaaccagcgaggtgctggaagtgccgtgccacacgcatatccagtggcaccacgtgctggcgatgaatgcgcatatccgtggcgaagccgagcacccatcgctgggtatcgacgcgttgaagaccgatcgaatcctggacaaggtgctacaacgtaacccccatcgtcccgggtaggcggcatagggtggtcttttttccaaggaacagacagatgaaatactggatggcggtatggctggtactggcgacaagtgcgatggcggcgccgcgcagccaaggcacaccgggggagtttgatttttatgtgctgtcgttgtcgtggtcgccgaccttttgcctgacgcacccggacaacgagcaatgttccggcaagggctacggttttgtcttgcatggcctgtggccgcagtacgcgcgtggcggctggcctgcatcctgtgcgccgcagtcgccgttgagtcgcgaagaaatcgagaagggcgcaacactgttcccaacccgctcattgcttaagcacgaatggtccaagcatggcacctgcagtggcctggaacccttggcctacctggaaaaaaccgaccaggcgctgggggtggtgagcattccgcagcaactgcagccgttcaatacgccgccgtcgctgcaggccagtgagatcgaggcgttgttccgtgaaagcaacccgcgcatgggcaatcatgggctggcagtcatctgcaaaggcaaagtgctgtccgaggtgcgggtatgcctgaccaaggacctggccttcgccggttgcccgcgcagtgtgaaaacccaatgccgcgatggcgacatccggattcccgcgcagcggtgataagccgctggcgggcatcgggttgatcagttgttgaggtagaccgggctgtcggtggacaacgaggccttcacggccagggtcatgtcggtgatcaacacttcttcgcggtcttcgctcagggccttgagggtgatggcgaccacgtcctggggcgtgctcttcggcgcctgcacgtcggccaccatatcggtgtcgatgtaggcggggtgcacgccgatcaccagggtcttctgttcgcgcagttcgccgcgcagtccattggtcaggccccactgggcggacttggaggcgctgtagccgccagtgccgggcgggctgagccagctcaataccgacagcacattgatcagcgcgccgccgccttgcctggccaggatcggcgcaaacgcacggctgacgcgcagggtgccgaaggtgttcacgtcaaagtgctgttgcaggttttcgacgctgtcttcagccagcagcgagccgtatttcaggaaccccgcgttgttgatcaccacgtctacatcggtgcactgctcggcggcgcgctgcacgctggcctggtcggtgatgtccagggcaatcggcgtgctgccggggaggttcacgctgcctggatcgcgtgcgccggcgtagaccttggccgcgccggcttccagcaaggcaatgacgaatgctttacccaggccgcgattggcgccggtgaccagtaccacttttccacgaatatccatgatgcgctccagacagttgttaggtttaataatgaaaccgtttttatcctgagcctgttggtcctataatgcaaccttattttgcaagtgcccggaggcccaacgatgaaacgcaaatgcctggaaggcgatggctgcccggtggcccgcgccctggacgtggtgggcgactggtggacgttgttgatcatccgcgacgcctttgccggagtaacacgtttcggtgattttcaaaaacacctgggcgtggcgaaaaacatcctcgccacacggctcaaggacatggtcgagcaaggcctgttgcagaccagcgaagtcggtgcgcgcagcgagtaccagctcactgacaagggccgtgcgctgatgccggtgctggtgacgctggcgcagtggggccaggcctataccgagccggaggaggtcggcgcgcaagtcttggatgcgcgctcgctcaagccactgcgcaaggtcgagatcctcgccgaggatggccgagtgttgggcatcggcgacatcgtcacccagatgcccggggcttgaggcggtgcctacttgctgtcgaggaagcccagcagggctgcgttgaacaacgccgggtcttgcaggaacgcaaagtggctggtgttcggcaggatcagcaggccggcgccggggatggttgcggccatgtactcggtgtgttcgcgcttgatcgcttcgtcatggtcgccgtcggcaatcaggatcggcgtcttgatgctttgcaattgtgcgtcagtccagttcggttggctggcccacatatggctgatctgctcgacaaacgcgtcgtactctttcggcgtcggcgacagcttggcgtactccttgccggcgcgctcgatgaaggcggcaaaggtcgggttcttctcgacgccgtccttcacgcctgcggtctgggtgttggcggcgaaggcgaagactttgccgaggcggtccgggtgacgcagggccaggtcgatgccgatgatggcgccgtcgctccagccgacgatatcggcgctggggattttcaggtggtcgagtacggccaccacgtcatcggccatcaggtcataaccatagggtttttcatcccgcgaactgcgcccgtggccacggctgtcgatactgatcaccgtatgccttgccgccaaggccttgacttggttaccccaataatcggagttggacaggccgccgtgcagcagcaccaccggcgagccatggccggtacgggtgtagtagaccttgatgccgttgacggcggcatagccggtctgggcaccggccacaggggcgggcgttggcggcagcgtttcccagcgctcagcggcttgggcggcggaaaaacatagcatcaggcaggcggctgccagcaggcgacgtgacatggcggttcctttttttgatcaggagggattgaactctagcatcgccccccgcacggcaaatacgcatttttgcctatcaaaatcgcctgtgcgaaagaaaaaaatgcagttatatcaatggaataaaagcgtctaagcgagcgaggggcattttcttcaatacctcgaccgagtggcccccttaccgtggccccatcgtcattcgctcgaataacaaggaactgcaatgagtctgatcatttccatggctgccttcgcactcgccacgtctatcacccccggcccggtgaatgtggtcgcactgagttcgggagcgcgtttcggttttgtcgccagccagaaacacgtcttgggcgccgccgtgggcttcacgttgctgttggtgttgattggcctggggttgcatgaggtactgatacgttggccgatactcacccagttgatccagtggggcggggtggcttttttgctgtacatggcctggaagttggcggtagacgatggccggctcgacgccgatggcagtgccacggcgccgtcgatgctgtatggcgcgatcatgcagtggctcaaccccaaggcctggctggcgtgtgtggcggggatggggttgttcgtagccgatggcgatgcacggcaggtgtggttgtttgccgggctctacctggtgatctgctatctgtcggtggcgtgctgggcctatgccggcacgtttttgcggcgctacctgggcaacccccagggcgtgcgcgtattcaaccgttcaatggccgcgttgctggtggccagtgtgggttatttgctgatggcttgagcacgtcgcggtattgccctggcgttgcggcgaaatgctgtttgaacgcgcgctggaaatgcgcctggtcggcaaaccccgccgccagggccacgtcggcgatgggcgcgccctgacgcaatcgggcgcgagcgaactggatgcgctggttgaccaggaaggcatggggtgtcagcccgtaatattgcttgaaggcgcggatcaggtaggacggcgacagttcggccgccaggcagatgtcttccagcttcaccccttcggtgcagtgcgtgcggatgtactcggcggcccgctccagcttgtggttgacctcgcgcagcggggtgccggctgggttgaggcgctgttgtacgtcgctgaagtaactcaccagcgcgtcctgtttctgcaagtgctcggcctgttcatcgaccagaatgcggtacaactccagcaagccacggtacagcacggcgtcctgggtatggggcgtgttgaacggccggtaaccctggtcggtgctgaagcccaactgatgctgcaactccgtcagccagggcgtgtcgatgtacagcatctgataggaccacggctcattatcgatggggttgcaggcatgcacatcgccggggttcatcaacaccaccgtgccagcgctgatctggaacgtgtcggtgccatagtggtagtagctgcgcccgctggtgatcgcgccgatggaaaaatgctcatgggcatgccggctgtaggtgaccttgcgcccatcagcgatggtgcgcgcctcgatgaaggccaacgcggggtcacgccagaaacacggagcagtggcagcagtcatgggcgggcgcttcctcgcagcaggtgaacgggtagggcagcagcgtcagctaaaacccgccattgttcaagccctggcgtaccagtggtgcatagcgtcgcaggtagtcggcccatgggtcgttgccgctcaccgcctctgccagggtgatcggcagccgggcattttcacgtagcgcctcaccgtcatgcagcagatgccgctcgacgatgacacgggtcaatgcgcgggtgcgtggtgagtcgaaggtgcgcgggacccggcgtccgaagaggtccggtgcgggtattgcggcgggcgccaggttgtcgagttgacgaatgaccagggcgttgtcggcagtggtcagcgccacctcggccggtcgggttccttgcgcataggccggccagtcgaaacgcatccaggcactgctggcgccgttctcggccgcgtgtgtgacctgttcatagtcaaggtctggacgtggacgaaccagcaggtgcctgggaaagatttcatagaacttgcggtcgccgtagtgcgagacatacatcagcacgccgaatcggccgacatcggcagcccgccgctgggcaataccgaaaaaccccaccaggccgtactccagggcttcacgactgggcaaggtcaggtgcgacaaccaataccggatggcagtcccataagcgtctttcagttgcccgagcttgcggtcaaaggtctcgaaaaacagccggttgatcggggtcagcaaatggaattgccgagccatttcccggtatttgaccgctgtgtttgtggagtgccagcgtgtcgacgtgacatcgagcgcgccagcactgtgcaagtcgacgaacgagtacagtgggccgctgtacacaccttcgaaacggccttcttcggaaaatggcgagttttccggcaggtacatcaatactggttgatccaacagaggggtgttggggtaaaccctgcgcagatcttccagggcggtctggcgtagggtcaccacgggctgcgcaaacgtctcgagcgcggcggcaaggctggctcgctgttggttgaggctgtccagcgccgtgttgatcgcctgcacatcgtaatgcggttgagggcccagtatgccgttgaccacggcccactccagcaccggcggcgctgcttcgctgctctcgataaagcgtttccagctgccttgtggcgccagcccggccaggaacatgatctggctgtaggtcaattgacgggaagaccctggcatgaccttttccatgtacatgacgtattgacggtacaacacccaggtctgggcactgaggcaaggcgttgcgtcgggtatgccgcgtacgagcaagtgcgggcttttttcgctcagcaacaggtgcgcggccagtgctgcggtggctgcgtcgagcccgttcaggctgctatcgatgttctggcgtacaaacggcacgtgttcgccccagaagtaatcggagtgccagtcgattaggttgatacgggtggggtatgcatcaggctccgggtccaggctcaggatcagggcggcgagtatcagcgcggtgcggctgcctcgctccgtacgttcacctgcatggccgccatgccagtgcagggcgttcgacaaagcctctgccagttgctgggccaagggtgtcgcgagcaggcggaccatgaggaaatccgcctccgccctgacatcggctatggacttgccggcgacgatgggctggccgaggtactcgaacagcggcacgtcctggtcagccatgaagcgctcgatgatgcgcacaatctgcgcacgctcgagcaccgacagtttccaggccgaaggctgtgaaccgtacagcggcttgagcgctcgccagtagtgcccctgacgcgccggcagcggttggctgaccgccaattgctgcaaggtcaggcgtgcctcatccaaggtctcggggcgttcaaggtgatacaggcgcagcgcctgagaaagcgtgaccttgaaacgactgcgcaggtacccaccggttttagccgcgagctgtttgaggggagggaccagggaggcaagctcgatattgctcatcaccggatcggtcaggtttttccaggtgccatccaggccattggcgcccacgctgccggtggcgctgagcagcacatggctgtcggggtcgatacgttgctgggtgcggatggtcaggaagtccgggtgatcggtcagcgtgttgagcgccgcgtaggcttttttaacggtcgcctggagggtgtccgggtcgacgttgctgccgatatcgagcgtgtcggcatcgctcaggttgccgccatcgatcactgtcgataacccagcgcgcagcgcgtggcgatcgttgagcaggccgacgtactgccgatagcgatacagttcgccgaatgagcgggcgctgttcaataccaccgggggcgcaggcgccggccagttgcgcaggcgctcgctcaggaagctgacctctgtcctgttcagcgggcgttcgatggcgtacgcctgtaaaaccccgacaatactgatgcgccggtcgggataaagatgactgcccagttgttcgcccagcgttccaagcctgtgccaccgcgcatcgggcacatcgggcgccagggtgttcatctccagcccgctgtcggggctcagcacgcacaacacttgccgctggtaatcgtagtaagtgggccgcggtgcgtcgtctgtggtgcccaggtcgtggtgatcgatgattgcccgcaacagatcggcggcctctttaaggtttctggccagccgcgagtccgactgcagatacagcgcagtgctgtagacgtcgaaagcgttaaagctgttctcgtccctgaccagttgttgcagggcgtcagccagttgcacgtagtcgcgcgcctgctggcccagttcggcgtagctcatcgacttgctgcgcccgttgtcatcaaacccgggaaaaccttgcaaggcctcgagttcttcgacaatggtctgcgcctggaggcggttcgcaggcattggcaagccatggaacgccagggtcaggttcaagggaaagctgcgcacgccggcaggaggtacaggtgcgatatacggcatgcccagctcggtcgggtccaggagttggctgatgtagatgatcgggttggccagtgtccaccaggcggacgagtcggccaggcaatagaccttgggttgcccgtgagccgtcacgctgagccgactgttgtgcacccgcagcgtagcgagatcaaacccttgggcgttggcccagtcgatgaaatctttctggttgatggctttgcaaaaggcttcgcaccactggcccaactgtgaatgctcgatcatggttacggggtgcgtgggaagcggcaacgcttggttcgaggcggtggccaataggcgggtcagttgcgcgatcaagggtgggtcgccctcgttgcgcagggtctggcgctcgctcaggtaggcgctggaggggctgacactgagtggcaggggcgtgtcgctgggcaggttgtcccaggtcagggcaagggcgtgaatgtcatccatgagggcggttccggctgatcaaaccccggatgatccgccccagggatggggcatctgtagcaggcgtttcctgcaaggccgtggcttgcgtcagccacggcggcaaggttcaggccggcgctcagaagtcccagcgtgtcgccaattgcaggctgcgcggctcgccatagaacccggtgccgaagttgcccagcccggtgtagtactttttgtcgaacaagttcttcacgttgagtgtggtgctcaagtgctcgttgaagcggtagcgcgccatcaggtcgaccaggtagtagctgtcctgggtgatgcgcgcgttgtggccgaagttgacggtgtcagtcggatcgggctgggacacgttgccgaagaattcactctgccagttcaccccaccgccgacggtgacgttctctagggcaccgggcaggcgataggtgctgaacaggcgcaccacctgctgcggtgtggtggtttgcagcaccgagctgtagacgtagtcgtccttggcatcacgggtgtgctggtaggtgtagccggcggagacgttccagccgtccagcacttcacccgacaactccgcttcaaagcccttggtggtggcgccggcgatggggcggtacaccgagtcggtctcgaagcccgagacgtattcggccacgttgtcctgctggatacggaacgcggcaaagctggcgttcaggcgcccgtcgtagaacgcagccttgagcccggcctcgtaggtttcgccctcgatcgggtcgagcagtttgcggtcggcgtccttgctggtttgcggacggtagatctgggtgtagctggtgtacaccgaccaggtgtcgttgaggtcatagacgatgccggcgtagggcgtgaccacgccgctctggtgataagtggtgcggttatcggccttggtcgggtcgtagaaatcggtggtgtcggtgccgctgaaggtgctgacgcgggtgccgaggatcaccgacaaatcatcggtgggcttcaggcgcgtggccaggtaggcgccggtctggcgctgcacgatatcgttctggccgctgcgcgggatgtccggcttggcgtactcgccgtgccagtcgaagatactgccgcccaccgctgggtagatcgagccgtacaccggcacgtcctgtttcgagcgggtggccatgaagcccatgatcagttcgtgttcacggccgagcaggctgaacggcccgctgaggttgacgtccagggtgttctgcacctgatcgcccttgtacttgcccatgaacatgtacatgttctggccgctgaccgggtccgggttgccgccgctggcggatgcgagcagggtgtcgtgctggctgcgcttgcggtcgaggctgactttgagtgaccagtcgttcgccagcttctgctgcaccgaggcgaacagcgtctggttctggaagtcgcggcggctccagtcggcggccgggttgaacgaacgcgaaaagttcgtgcgcgagccgtcgctgaaatacatcgggaatccggtccagctggcaccacgtgagcgggtgtcctgctggtcgatgccgaaggtcagcagggtgtcgggtgtgaggtcggcttcaaggatgccgtaggcgatgtccttggtgttctggtagtggtccaggtacgactggcgatcctggtacacaccgacaaaacgcccgcgcacattgcccgacgccgtcaaggggccggagatgtcgccttcggtgcggtagttgtcccaggagccgaaggtctgggtcaccgaagccttgaacgctgccgtgggttttttgcggatcaggttgaccgtggccgaggggtcgccggaaccgctcagcaggccggccgaacccttgatgatttccaggtggtcgtacaccgccatgtcggtgctggtggtgccgtagtcatacacgccgtcataggtggaattgacaccgtcgtactggaaattggtgatcggcaggccacggctggaaaactcccagcgctcgctgtcgtagttctgcacgctcacgccgggggcacggcgcagggtgtcagcgatgctgttggtgccctggtcgtccatttgctggcgggtgatcaccgtgaccgactgcggggtttcgcgcatcgacagcggcaggccggtggccgaggccatggagccggtggtgtacgaatgggtgtcttccgtggtggcgcccaggtcctggcccgaaatcgtcgtggcggccagctccagggcgccggtgttggtcgggatcagttccagtacgtagccgttgttgccttggggcagggcctgcaaaccgctgccctgcaacaggcgctgcaagccggccgccggggtgtagctgccattcaggccggggctggttttgccggcggccaggctgttgtggcccgcgatgaaaatacccgactgctcggcaaagctgttgagcacgctgaccagcgggccggcagcgatgtgatagctgcgtgaagcttcctgggtcgagggcgattcggcggcttgcagcgacggtgcgcccaggcaaaacagcgaggtggccagcgccagtgggcgcagcgcgaagcgggcaggttgcgacatggatgtttccctttggatcagatcgatcggcgaattgaaagcgtctgctgggttaaccgaacgaaggtgggaaaagggaactggtgctgagcgtttttttactttgggccgacagtgacccaccacggcatcggtttatccacgcgaatcggcagcgccgcctgcaacaaacccagggcgtggtcgctgtcttgcagcgggaatgaccccatcaccggcaagtgcgccacggctgggtcgcagcccaggtggccggggcgatagcgattcagttcggcgatcaattggccgagcggcaggttatccgccagcagcacgccccggctccaggcttcacgggccggggaggcgggcagggtcgggttgaaaccgttggcggtgaacgacacttgttggccggtttcgatgatgcgcacgtgctggtcgagggcggtgacttgcacccgcccttcgaacacgttgagctgggtgtggtgttcgccgtgcagcacactgaaacgtgtccccaacgcctgcaggcggccgtgtccggtgtccactaggaaaggccggagggcgtccttggcggtgtcgatcagcacttcgccaaagcgcaactgcaataaccgctgcaccgcatcaaagcgcacgtccacagcgctcaaggcgttcaaccacacatggctgccatcggccagcagggcgtcgcgcgtctcaccgctaccggtggcatagtccgcgcgccaaccgccgaccaaccggggcaggacggtgttgcgccaagcgccccaggccaatgtcgaccccccgcacagtaccagcagcgtcttgagggtttgccggcgcgagctgcgcaacgcccggctcgcgccatggggttgctccatcaagggcgcaaagcgctggctgacgcgttccacgtactgccatgcggccaagtgctcggggttctgcgcgacccaggtttgccagcgttgctgttcctgcgtacccgccgggtcctgcaggcgcacgtaccactgcgcggcctgttccaggctggcgtggctgagcttgccgggcgtgttcattgcaccaccatcccgtcgagctcggcttccaagatcgcgcagtgcagcagggcctgggccaggtatttcttgaccatgcgttcgcacacgcccaattgcaggccgatctgtttgtagggcaggccgtgcagttgagcgagcaggaaggcttcgcggacgttcctgggcaggcgagcgagcatggcgtccacttcgtagagggtttcgacgatgattgcccgttgctccggggacgggtgcgtgtcttccgggcgttgcgccagcgactccaaccaggctttttccagttggcgacggcgccagtggtcgatgcacaagccacgggcgatggtcgccaggtacgagcgctggcgcacgtgatcggtctcggccaccgggcggttgaggatgcggataaaggtgtcgtgggccaggtcggcggcatcccagcggtcgttcaggcgccggcgcaacaggccgagcagccagctgtggtgggtgccgtagaggtgggtgaaagaggtcgacacaatatccatccaacgcaaaaggattggcgtaaataagaattggtcgcgattaaagcaaagggagggggcgtgcgcaaatgatattggattgctattgggtgcaatcccctcccaggtttgaagggtgtcaggctggaaccaggaaagccgcctccagcagttgccgggtgtaggcatgttgcgggtcggcaaagatcgccttggcatccccttgttccaccacctgcccatgcttgaccaccatcaactggtgactcaacgccttcaccaccgccaggtcatggctgatgaacaggtaggtcaggttgtacttggcctgcaggctgcgcagcagttccaccacctggcgttgcaccgtgcggtcgagggccgaggtgggctcgtcgagcaggatcaggcgtggcttgagcaccagcgcgcgggcgatggcgatgcgttgccgttggccgccggagaactcatgggggtagcgatgccgggactccgggtccaggcccacttccttgagcgccgcgataatcgccgcttcctgttcggccggcgtgcccatcttgtggatgcgcaagccttcgccgacgatctcactgacgcacatacgcgggctcaggctgccgaacgggtcctggaacaccacctgcatttcccggcgcaacgggcgcacctgctgctggctgagcgtgtccagttgctggccttcaaaacgaatgccgcccttgctggcgatcaaccgcaggatcgccaggcccagggtggacttgcccgagccgctttcaccgacgatgcccagggtctgcccctgaggcaggctgaagttgataccgtccaccgccttgacgtagtcaaccgtattgcgcaaaaaacctttcttgatcgggaaccacactttcaggtcatcgacctccagtaacggtgggccaacctcgttggtcgccgggccgccgctgggttcggccgctaacaactcctgggtgtacgggtgctggggcgactggaacagcgtctcgcactccgcctgctcgacgatgcagcccttttgcatcacgcatacgcggtgggcaatccggcgcaccaggttaaggtcatggctgatcagcaacagcgccatgcccaggcgtgcctgcaattccttgagcaattccaggatcttcaattgcaccgtcacgtcgagtgcagtggtcggttcatcggcgatcagcaactccggctcattggccaaggccatggcaatcatcacccgctggcgctggccgccggacagttcatggggcagggccttgaggcgcttgtgcggctcgggaatacccaccaggtccagcagctccagggtgcgctgggtggcgaccttgccttgcagccccttgtgcaggcccagtacttcgttgatctgcttttcgatggtgtgcagcgggttcaaggaggtcatcggctcctggaagatcatcgcaatgcggttgccgcgtatgtggcggatggttttttctttcagggtcagcaggtcctgcccggcatactcgatggtgccagaggggtgacgtgccagcgggtagggcagcaggcgcaggatcgagtgagcggtcaccgatttgcccgagccgctttcacccaccagtgcgatggtttcaccgcgcttgatatcgaagctgacattgttcaccacgcggtggtggtgttcgcccgtgacgaactcgacggagaggtcgcggatttcgatcagattgtcctgattcatctcatttcctcgggtcgaaggcatcgcgagcggactcgccgataaacaccagcaaactcaacatgatcgccagcacggcaaaggcactcatgcccagccacggcgcttgcagattggatttgccctgggccaccagttcacccagcgacggcgaaccggcgggcaaaccgaagccgaggaagtccagagcggtcagcgtaccgatagcgccggtgaggatgaacggcatgaaggtcatggtcgacaccatcgcattgggcaaaatatggcggaacatgatcgcgccgttctgcatgcccagggccctggcggcgcgcacatattccaggttgcgcccgcgcaggaactcggcgcgtaccacgtccaccaggctcatccacgagaacagcagcatgatccccagcagccaccagaagttgggctgcacgaagctggcgaggatgatcaacaggtacagcaccggcaacccggaccagatctccaggaagcgctgcccggccaggtcgacccagccgccgtagaaaccctgcagcgccccggcgatcacgccgatgatcgagctgagcacggtgagggtcagggcgaacagcaccgacacgcggaagccgtagatgacccgcgccagcacatcgcggccctggtcatcggtgcccagcaggttgacactggaaggcggcgcgggggccggcaccttgaggtcgtagttgatgctctggtagctgaacgggatcggcgcccacaaggtccaggcgtccttggccttgagcagctcctggatgtacgggctcttgtagttggcctccagcgggaattcgccgccgaatgtggtctccgggtagcgcttgagcgccgggaagtaccagccaccgtcgtaatgcacggccaggggtttgtcgttggcgatcagctcggcgcccaggctcagcacgaacaggatcaggaacagccacagcgaccaccagccacgcttgttggccttgaaacgttcgaaccgacggcgattgaggggggacaggttcatctcaatgctcccggctggcaaagtcgatacgcggatcgaccagggtgtaggtgaggtcgccgatcagtttcacgatcagccccagcagggtgaagatgaacagcgtgccgaacaccaccgggtagtcgcggttgatcgccgcttcaaagctcatcaggcccaggccgtcgagggagaagatcacctccaccagcaacgaaccggtgaagaagatcccgatgaaggccgaggggaaaccggcgatcaccagcagcatcgcgttgcggaacacatggccgtagagcacacggtggttggtcaggcccttggcttttgcggtgaccacatactgtttgttgatctcgtcaaggaagctgttcttggtcagcagggtcatggtggcgaagttgccgatcaccagggccgtgatgggcagcgcgaggtgccagaagtaatcgaggatcttgccgccccagctcagctcatcgaagttgttagaggtgagcccacgcaacgggaaccagtccaggtaactgccgccggcaaacaccacgatcagcaggatcgcaaacaggaacgccgggatcgcgtagccgacgatgatcgccgagctggtccacacgtcgaaatggctgccatgccgcgtggccttggcaatccccagggggatcgacaccaggtacatgatcagcgtgctccataacccgagggaaatggacaccggcatcttttccttgatcagatcgatgaccttggcgtcgcggaagaagctgtcgccaaaatccaattgggcgtagttcttgaccatgatccacaggcgttcaggcgccgacttgtcgaagccgtacatcttctcgatttccttgatcagcgccgggtccaggccctgggcgccacggtagctgctggaaccggccaccgacacttcggcgccgccgccggcaatgcggctggtggcgccttcaaaaccttcaagcttggcgatcatctgctccacagggccaccgggggcagcctggatgatgacgaagttgatcagcaggatcccgaacagtgtggggatgatcagcaacaggcggcgaaagatataggccagcatttaatcgcctccactcgccggatcggcgctggtgttggtgtctgggatgacggccggtttgacgtcgggcttggcccaccaggtggcggtgccgacgtcgtagcgcggtgggaccttcgggtggcccaggtgatcccagtacgccacgcggaaggtcttgatgtgccagttggggatcacgtagtagccgaactgcaacacgcggtccagggccttggcatgcgccaccaggcttttgcgcgaatcggcgtcgatcagctcttccaccaactggtcgatggccgggtccttgaggcccatgtagttgcggctgccgggcttgtcagcgctggacgatttccagaactcgcgctgttcgttgcccggtgaagtggactgcgggaagctgcccaccagcatgtcgaagtcccgcgagcggatacggttgatgaactgcgacacgtcgacccggcggatcaccaggttgatgcccaggtcggccaggttgcgcttgaacggtagcaggatgcgttcgaactcggtctgggccagcaggaattcgatagtcaccggtttgccggtggtgtcgaccatcttgtcatcgacgatgcgccagccggcttcctgcagcagttggtaggcttcgcgctgctgggcgcggatcatgccgctgccgtcggtcctggagggttcgaaggcctgggtgaagacttcgggcgggatcttgtcgcgcaggggctcgagaatcgccagttcatccgggccgggcaggccggtggcggccatttccgagttttcgaaataactgcgcgttctggtataggcaccgttgaacagctgtttgttgctccactcgaaatccagcaacaggctgatggccttgcgcacgcgcacatcctggaacatcggtttgcgcatgttgaacacaaagccctgcatcccggtggggttgccgttggggatttcttccttgatcagccggccctgggcaacggcgggaatgttgtaggcattggcccagttcttcgcgctgaattccagccagtagtcgaactgcccagccttcaacgcctccagcgacacggtgctgtcgcggtagtagtcggtgatgcggttgtcgaagttgtagaaacccttagtgatgggcaggtccttggcccagtaatccttgacccgctcgtagcggatcatgcgcccggccttgacctcggcgaccttgtacggcccgctgcccagcggtacttccagattgcccttggcaaagtcgcgggtggcccaccagtgcttgggcaataccggcagttgcccgaggatcagcggcaattcacggttattggtgcgcttgaacttgaacagaaccttgagcgggtcttcggcgatcacttcgtcgacgtcggcgtaataggtgcggtagatcggcgagccttccttgatcagttcctggaaagtaaacaccacgtcctcggcgcggatcgggtggccatcatggaagcgcgcttccgggcgcaggtagaaacgtacccagctgttgtccggagctttttcgatcttgccggcgaccaggccgtattcggtgatgggctcgtccaggctttgcatggccagggtgtcgtagatcaggcccaggttgtcggccggtacacctttgctgatataggggttgaggctgtcgaagccgcccatggccgactcgcggaacgtgccacccttgggcgcgtccgggttgacgtagtcgaagtgcttgaagtcggcggggtatttcggcggttcgttgtacagcgtcaacgcatgttgcggggcggcgtgggccgcagtgcacagcagcaggctgccgagcagggcagtacgcaaagatatcattgggctttctccgaagctttcagccaccacgcgctcaggcccaggctgtagggcggcgtggtgacaaaggcgaaccggtcgcggtacgccaggcgatgatagttgaggtaccagttgggaatgctgtagtgctgccacagcagcacccggtcgagggcacggccggcggccagttgctcttcgcgggtcttggcggccagcagttgttccagcaggtgatcgacaatcgggttattgatgcctgcgtagttcttgctgcccttgatcgccgcctggctggagtggaagtactgccactgctcaaggcccgggctcaaggtctggttgagggtgatcaggatcatgtcgaagtcgaattgatccaggcgctgcttgtattgggcgcggtcgacggtgcgcaggcgcgcgtcgatgccgatgctgatcaggttctcgacatagggctgcaggatgcgctccaggttcgggttgaccagcaggatctcgaagcgtagcggctggccatccttgttcaccaggcgctgcccggacagcttccagccggcctcgccaagcagggccagcgcgcggcgcatggtttcgcgggggatgccgcgcccgtcggtctggggcaggctgaaggcttgcgtgaacaggttggccggcagttgctcgcggtacggcgaaagcatcagccattcatggccggtgggcacgccggtggcggcgaattcgctattggggtagtagctcaaggtgcgcttgtacgcactgctgaacagggtgcggttggtccactcgaagtcgaacatcagccccagggcttcacgcactttggtctggctgaaggtgggccgccgcgtgttcatgaacaggccctggctctgggtcgggatctggtgggcgatctgcgccttgatcacgtcaccccggttcaccgccgggaagttgtagccattggcccagttcttggcctggtgctcgatgtagatatcgaactcaccggccttgaaggcttcgaaggccacatcgctgtcgcggtagaactccacctcgaccttgtcgtagttatagaagccctggttcaccggcaggtccttgccccagtaatccttgacccgttcgaacatcagttgccgcccgggcgtgaccttgctgatgcggtaggggccgctgcccaggggcggttcgaaggtggtggccttgaagtcgcggtttttccagtagtgctggggcaataccggcaattcgcccaggcgcaggatcagcaaggggttgccggcacgcttgaacacaaagcggatgcggtgtcggttgagcacatccacccgcgccacttcctgcaggttggtgcggtattgcgggtgcccttcggtcagcaaggtgcgataggaaaacgccacgtcatacgcagtgatcggcttgccatcgtggaagcgcgcttccgggcgcaggttgaacaccacccagctgcggtcctcgctgtactccaccgattgggcgatcagcccatagctggaggtgggttcatcgccggagggcgcgtacaggccggtgccaaccatcaatggctcattcagctcattgacgccatattgcaggaagttcggcgtggacaccgggctggagcccttgaaggtataggggttgagggtgtcgaaagtgccaaaggccatgacccgcaaagtcccgcctttcggcgctgcagggtttacccaatcgaagtgggtgaatttggccgggtacttgaggctgccgaactgcgcataaccgtggctctcggtaatcgtcgcgttcgctgcaaagctcaaggccagacttattagtagaaggaggggacgcttcaagtcagagatccgatccaggcggcttgggctttatgatcggtacagtaacagcttgttccggttggaaaaagccagtcggctgatgcagggccaatgtgggagggggcttgcccccgatagcggtatacctgccgatgaatctgttggctggtacattgctatcgggggcaagccccctcccacatggattccccagttttcttgaaccttagcgtggacctgataccaccagcatctgcccaggcttcagggcctggccggtacgcgggttccagcgcttgaggtgttgcatctcgacattgaagcgcttggcgacgatgtacaacgagtcgcctttcttgaccttgtattgcaccggcttcttgctgtcggccttggccaccagcttgcgcgtgtcctgcatcaccagggtctggccgaccttgagcgcctggccgttgagcttgttccagcgctgcaggtcatgcacgtcgaccttgttggccttggcgatcagcgtcaggttgtcgccggtgcgtaccttgtagctgcgggtacgcccggccacccgtgcggtctcgacttcgtcgaacacctgctttttaggacgcatcgccagcaattcttcaggcttcatcgtcgaaagcgtgctggtcagcaattgcgccttggaactgggcaccagcaaatgctgcgggccatccagggtggtgcgttgtttcagcgccgggttgagctggaacagttcgtcttcgtcgatctcggccagcgcggcaacccgggacaggtccatgctctgcttgacttccaccacttcgaagtacggctggttggcaatcgggttcaggttgacgccataggcctcgggtgccagcaccacttgggacagcgccaggaacttgggcacgtagtccttggtttcctggggcagcggcaggttccagtagtcggtcggcaggccgagcttctcgttgcgctcgatggctcggctcaccgtgccttcgccggcgttataggcggccagggccagcagccagtcgccgttgaacatgtcatgcaggcgggtcaggtagtcgagggcggcggtggtggaggcggtgatgtcgcgacggccatcgtaggcgcgggtctggcgcaggttgaaatagcgcccggtggaggggatgaactgccacaggccgaccgcatcgctgcgcgaataggccatcgggttgtaggcactttcaatcactggcagcagcgccagctccaggggcatgttgcgttcttcaaggcgttcgacgatgtagtgaatgtagaggctgccgcgttctccggcgttctccaggaaggacgggttgctggcgaaccacaggcgctgttgctcgatacgcgggttgacgcctaacccgtcctgcagctgaaagccccggcgcatgcgttcccaaacatcctggggcacatcgggcgtcggtttttctgaaagccagatgacgggtttctgtttgattttggcggtaaggtttggcttgggttgcacggtggattgtgcggtgaaattgcttgattggcagcccgccagtgtggcggacacagccaccgccacagcttgagccaggcgggtcaatgcgtctgaatggttggatttacgaatagatgacgacattggctggaagtaagttccgggcaaaaatgtcgggcgattctagaaacccgctgggttccggtcaaccattcagaaattacgtatcagattgcttcccgttagaacttatctttccaggccctcaagctagcaaacacctcggccccagagcggttgtcgcggccgttccgttcgtccgctttttgtttaacggatgtttcagaggtgcgtagaaatgggttggtcagcttttccagggccaggttggaaggcagcgtgatctcgcccctggcgcgcagttggcgtacgttttccactcgttcggctatatctgtgttatccggttccacagcctgggcgaacttgaggttactctgtgtgtattcgtgggtgcagtacaccaaggtttcggcgggcagggcggccaggcgttcgagggaggtgtgcatctgttccggcgtgccttcgaacaggcgcccgcaaccggcggcgaacagggtgtcgccacacaacagcacgcctggatgataaaaggcgatatggcccagggtgtggccgggcacgctataaatgtcgaagtcccagccgagtaccgtgatgcgctcgttatcgtgcaacgccacgtcccgcgccgggatcctctcgttggccgggccgtagaccttggcgtcggtctcacgcttgagctgttcgacaccgccgacgtgatcgtggtgatggtgggtgatcaggatgtcgctgaggctccagccagggttctgctcgagccaggccagcaccggcgcggcatcgccggggtcgactacggcgcagcgttgggtgcgagggtcctgtaacaaccagatgtagttatcggtgaaggcgggcagggcactgatctgtatcattcttcgattcgccaagctgaacacattggtgcatcttagaacgtctaggcgagttggagaatgcaatgactgataaagcgttcgcccaggccgatcctgagtggctggccctgatcggcgcggcccgcgagtggctgtccggtcccatcgggcaatttctgctggacgaagaacggcgcatgctcgaagacgagctgggccggttctttggtggctatctggtgcactacggcccctcggccgaaacgccgccctgcgcgccgcaggtgcaacgtaatgttcgcttgggggcaccgttgcctggcgtggagattgtgtgcgaggaacaggcctggccgttgagcgaacatgctgccgatgtggtggtgttgcagcacgggctggatttctgcctgtcgccccatggcttgctgcgcgaggcggcgagcagcgtacggcccggtggccatttgctgatcgtggggatcaacccctggagcagttggggcctgcgccatgtgtttgcccatgatggcctgcgccaggcgcgctgcatctcgccgcaacgggtgggcgactggctgaacctgctgggcttcgcgctggagaaacgccgcttcgggtgctatcgtccgccgctcgcgtcgaccaagtggcagggccgcctggccggctgggagcgccgggccggcgcctggcaattgtccggtggcggcttttatctgctggtggcgcgcaagatcgtggtcgggctgcgccccgtgcaacaggtgcggcgtgagccgatgggcaagttggtgccattgccgatggccaaggtcaaccgcaagcaaagcgaagcgtaaccctctttttgaattgataccgagcaaccgatgaccgatagcgtagaactcttcaccgatggcgcctgcaagggcaacccgggccccggcggctggggcgcgttgctggtgtgcaaaggtgtggagaaggagttgtggggcggtgaggccaacactaccaacaaccgcatggagctgatgggcgccattcgtggcctggaagaactcaagcgccgctgcaatgtgctgctggtgaccgactcgcaatacgtgatgaagggcatcaacgagtggatggtcaactggaagaagcgcgggtggaagaccgctgccaaggaaccggtgaaaaacgccgatttgtggcaactgctcgatgagcaatgcaatcgccatgacatcacctggaagtgggtgcgcggccatatcggccaccccggcaacgaacgtgccgaccagttggccaaccgtggcgtggacgaagtgcggggctacaagcagagctgatgctgactcacgtgttaacattgcgccctttgactcacaccacaccgttgagagctgaaccctgatggccatccgatctgttgtactcgataccgaaaccaccggcatgccggtgactgacggccaccggatcattgaaatcggctgtgtcgaattgatggggcgtcgcctgacgggtcgtcacttccacgtctacctgcaaccggatcgtgacagtgacgagggcgcgatcggcgtccacggtatcactgacgaattcctcaagggcaagccgcgttttgccgaagtcgccgatgagtttttcgaattcatcaacggcgcccagctgattatccataacgcagcgtttgacgttggcttcatcaataacgagtttgccctgatggggcagaccgatcgcgcggacatttcccagcactgctcgatcctcgataccttgatgatggcccgtgagcgccacccgggtcagcgcaacagcctcgacgccttgtgcaaacgctacggcgtcgacaactccggtcgtgaactccacggcgccttgctcgactccgagattctcgccgacgtctacctgaccatgaccggtgggcagaccagcctgtccctggcgggcaacgcctccgatggcagcggctcggcggaaggctccggcaaccgtccttcggaaatccgccgtttgccggctgatcgcaagcccaccaccatcatccgtgcgagtgagcaggatatggctgaacatgcggcgcgactggaggcgatcgccaagtcggcgggcgcgccggcgttgtggacccagctgacccagcaataacccctggctggactcgattaaaaatgtgggagggggcaagccccctcccacaattgatttcaattgcctgtaaatcttcattcgcgtcatggtcccccagcttctacccttgagtgcatagccctcaggacgacaagcactcatgtacaaagacctgaagttccccgtcctgatcgtgcaccgcgacatcaaggccgacaccgttgccggtgaccgggtccgaggcatcgcccgggagttggaacaagagggcttcagtattttctctgcagtggactacgccgaaggcaggctggtggcgtcgacccatcatggcctggcgtgcatgctgatcgccgccgaaggcgctggcgaaaacacccacctgctgcagaacatggtcgagctgatccgcctggcgcggctgcgggcgcccaacctgccgatctttgctttgggtgagcaagtcaccctggaaaacgcgcccgccgacgccatgagcgaactcaaccagttgcgcggcatcttgtatctgttcgaagacaccgtgccgtttctcgcccggcaagtcgcccgtgcggcccgcacgtacctggatggcctgttgccgccgttcttcaaggcgctggtgcagcacacggcggattcgaactattcctggcacacgcctggccatggcggcggcgtcgcctatcgcaagagcccagtggggcaggcgtttcatcaattctttggggaaaataccctgcgctcggacttgtcggtctcggtgcccgagctgggttcgctgctggatcacaccgggccgctggccgaagctgaagcgcgcgccgcgcgcaactttggcgccgaccacaccttcttcgtgatcaacggcacctccaccgccaacaaaatcgtctggcattccatggttgggcgcgatgacctggtgctggtggaccgtaattgtcacaagtcggtgctgcattcgatcatcatgaccggcgccatcccgttgtacctgtgcccggagcgcaatgaactggggatcatcggcccgattcccctgagcgagttcagccccgagtcgatccgcgccaagatcgacgccagccccttgacccgtggccacccgccgaaagtgaagatggcggtggtcaccaattccacctacgacggcctgtgctacaacgccgagctgatcaaacagcaattgggcaacagcgtcgaggtgctgcattttgatgaggcctggtacgcctacgcggcgtttcatgagttcttcgccgggcgctacggcatgggtacctcgcgcacgccggacagcccgctggtgtttaccactcactccacccacaaactgctggccgctttcagccaggcttcgatgatccacgtgcaggatggcggcgcacgtcaactcgaccgtgaccgtttcaacgaagccttcatgatgcatatctccacgtcgccgcaatacagcatcattgcctccctggacgtggcctcggcgatgatggaaggcccggccggacgctcgctgttgcaggagatgttcgacgaagccctgagcttccgccgcgccctggccaacctgcgccagcatatcgccgccgaggactggtggttttccatctggcagccaccgtcggtggcggggatcgacaaggtcgccaccgctgattggttattgcacccccaggatgactggcatggcttcggtgatgtagccgaagactacgtgctgctggacccgatcaaggtgacgctggtaatgcctggtctcaatgccggcggggccttgagcgattgcgggatcccggcggcggtggtgagcaaattcctctgggaacgcggcctggtggtggaaaagaccgggttgtattccttccttgtactgttctcgatgggcattaccaaaggtaaatggagtaccttgctcaccgaattgctggaattcaagcgcagctacgacgccaatatcagcctggccagttgtttgccatcggtgtttgcccaagggccgacgcgctaccaaagcatgggcttgcgcgacctgtgtgatcaattgcacagctgttatcgcagcaacgccacggccaagcatctgaagcgcatgtacaccgtattgccggaaatcgcgattaagcccgccgacgcctacgaccaattggtgaggggcgaagtggaggcggtttccatcgacgccttgccaggacgcatcgcagccgtgatgctggtgccttatccgcccggtattccattgatcatgccgggcgagcgctttaccgagtcgacgcgctcgatcatcgactacctggcgtttgcccggacgttcgatagcagtttccccggttttgtcgctgatgttcatgggttgcaacacgaagatgacggcagtggtcgttgttacaccgtcgattgcatcaagggttgaggatggttatgcaagctgtaatgaacccgaagtatccggggctcagtgtacgggtcgccgacgagggctttgatgcctacgtgtggggtaatgacttcagctttgaagtcagcgcctacggtgagccgcaaatgggcaagcgggtcgaccagtggcccgtggagcgtatcttgccgtaccgcaagtgctacggcattgaccctgaggagttcgccagtttccgtgacgcgcccgacagtgcgatcttcatggcttacctggacgaccgcgcggtggggcacatcgtggtcagcaccaattggaacggctttgcccatgtcgacgagttggcggtggccctgcctgcgcgacgccatggggtggccaaggcgctgctagatgtggcgcagttctggagccgcaagaaaagcctgcccggcatgatgctcgaaacccagaacaacaacctcggtgcctgccgcttgtacgagcgttgcggctatgtgatgggcggcatcgaccatctgcgctatcgcggtatcgacccgcagacccgcgaagtggcgatattctggtatcggttgttcaaaagcgaagccgacaacgcttaacccgccagcaaaccctcggccttctgcgtcacgatctccagcaacgcattcaacgccggggaggtcgggccatccttgagcgtcagcgcatacaggctgaccatgatcggcggcgacaccgggcacgcatccagcccggcctcgcgtgcgccgaacgcggtgaacgggtcgaccaccgccaggccttcgcctgcttccaccatgctgcgcatcatctggtaggtctgcacccgcgtctgcactaccggcagcgggcgcaaggcttgcagcttggcgtccagcaggcggctgagcgggtcctggccctccaggccgatcatcgactgcccggcgaggtcctgcagcgcaatgtacttctgcttgggtttcagccagccatggggcgccagcagttgcagcttgccctgggcgagtacggtgcagtggatctgcgggtgttccgggtcatgcaggctcaagcccacatcggcttcgtgcagcagcaggctcctgacgatctcgcgggtgggctggctcgacaggttgcagggcgtgtcctggaagcggcggcgcaataccgcaatgctttgcggcaacagctgattggccaggggcggtgtgcagagcacgcgcagggtaggggcatgatggtttttcaggcggctggccaggcgttgcaccggctccagggcctcatacacatgggcaatttccgcctgcagttccagggtttcccgggtggcctgcaagcgcccgcgtacgctggcgaacagcatgaagcccaattgctgctcggcgtccttgagcgccgcgtccacctcgcccacggaaagttgcaaccattcggcggccgtgccgaggtgtccggtctgcaagatggcctgaatcacttcgatatgacgtaaacgcatcgccggagtctatgtgcagcgggccgggtattcaatagaatggctgcgctgatcattaacgaccaaagccggctgccggcattaacaacaaaaacaggtctggtctcacatgcctctaccctcgatattcctcggggtaacggtcaagcaactgctggtcctggtgaccgtagggtgcgtggctgcttatctcttcaacagtcaaaacgataccgcgccggagaacctggcacttgaagcgtttatccgttcccaggaacaggtcgtcgaacaggtgggagcggtgctgggtattgaactggtcaggcaggtggtggcgcatccaggctacaacacggcaggctaccagcgttccatgttcgcggtggagggtgagcgggggagattggtggtgaccgtgaagaaggtcgagggcgagcagggcattgaagtgacggagatccgccgtccgtgatcaccccagcccagtcaacgccgtcaatggccaggactgagcaggtggataaggcgggatcttatgacgcgagggtggtttgcgattcgcgcacgagaatggtgcccgactggatcagcttgaattcgtcgccttccagtttctctacacggtcgccaatggccagcttgtaggtaatggtaggtgccgagccagccaggtcgccttgcgccgggttggattcctggaactcatgcaccgaatacacgcgtccttctgcgtctctggcatgaaactgtccgactaatactgctgccatctgtttagaacctctggagataaacactcgatttgcggttctgtagaccgtcatggagcggggtagtttacttacggaataaaaatactattcgccgacgttttcagatgcttcctacatagtgttgcgcagtgcaaacaaccgcaggattatcaaaaccttctggtgaaccggtcgcgaagactctataactacaagctccttttagtcagacgtcgggaaaccccaatgagcaaggtctacaccgtcgccgtcgtggtcggcagcttgagaaaagactctatcaaccgcaaggtcgcgctcgcattggccgaactggcccctgccaacctgaagttgaacattgtggaaattggcgatttgccgctctacaacgaagacattgacggagcatcaccgccggcagcctacagtactttccgcaaacaggtgagctcatccgacgcggtgttgttcgtgaccccggaatacaaccgctccgtcccggccccgttgaagaatgccattgacgtgggttcccggccctacgggcagagcgcctggagtggcaagcctggcgcgatcatcagcgtatcgccgggtgcgattggcgggttcggcgccaaccatcacctgcgccagtccctggtgttcctcgatgtgccgtgcatgcagcagccggaggcttacctgggtggggcgggcgccgtgtttgatgaggggggcaaggtctccgagaaaaccaagccgttcctgcaggccttcattgacgcctatagcaagtgggtggccaaacagcacggttgattacaaggaggcccggccgcaatggccgggcttttttgcgggtcaggccagttgatctgccaacaacagagcgagcgccgtgttgttgaggcgtgatgcctgatcgacctccggccccaggatggtcttttccacgtacaacgaatgcacgtccgtcaccccgataaagcccagccaggcgtccatatagggcttctggaaatccatcgcctgggcgtccggcgccgaaaaatccataccccgcgcgtacacattcaccgctgtcttgttgcgcaataacccgcgcaggccgtgctccgggctgaactcgaacagcacatctttctgcgacaccacatcgataaagtgcttgagcttgtaaggcaccgcgaaattccacagcggcaccgagaacaccagcacgtcagcctgatgcagctgggcggcgagtgttttgagtgcagaccaggcgatggcttgttcctcagtcaacggcgtaccgctgagcccggcgtacttggcgtccatcaccgggccgtcgaattcgggcagctccaatgcccacagatccagcgtattcacttgggtgtccggcgcgttttgttgatagcgggcaataaactggcgagcgatttccaatgatgcggagcgttgtttgcgcggtgagcattcgatgtgcaggagcgtagtcatggcaggcctcggataaagatgacccgagcattgcaacatagcgttgattgaaatataaatcgtgttttactagctcattgattgcgtatcaaaatatgttcgatagcgtattgctcaaaaccttcgtctgcgtcgtggatgagggcggcttcagtcgcgccgccgagcgtttgcacctcacgcaatcggcggtcagcgggcacttgcggcgcctggaggaacaggtgggcaagccattgctcacgcgcaccacgcgttctcaacagctgacagcggacggcgaacgcctgatggcgtatgcgcggggcatcctggcgttgaatcgtaatgcctgggccgagctgacgcgctcggcgttccagggaaacctgcgcgtaggcgtgtcggaagagtttgcgcaggcacgcctgttgcgcgagttgcaggaagtcgccgcgcactatcccggtatgcaaatcactgtacaggtcggcattcccggttcgctgctggcgttgatgaagcagggcgaactggatgtggtggtgggatcgttgtgtgaatccagcgagcccggcctggcgttgtggcaggaaccgctggtgtgggcctggtccgccagccgatgacgacattgcctgcgcccttgcccctggcgttgtttcccgaaccatgcccttaccgcgaagcggcgctgtcacgcctggcccaggccggcatcgcccagcgcaccgccatgctctgtacgagctacgccgcgctgcatgccgctgcattggccgggtttgccatcgcccccatcgcccgtagccaactggtgcccggcttgaccgtgctcggcgccgaacacggtttacccgcgctgcccgatgccgaattccgcctgttcagtgcgccggacgccgaccctcgcctggtcgaggtgatcacccaggtagtggtccgctacggcgcttccttgcgctagcgcggctcagcgcagccagttggtgcgggccagttcgatgacttcatcgccgcggccgctcatcaccgccttgagcatgtacaggctgaaccccttggcctgttccagcttgatggtcggcggcatcaccagttcctgagtggcggtgaccacatccaccagtaccgggccgtcatgggccagggcgcggcgcagggccggttccaggtcctcggattgctccacgcggatgccgaggatacccatggcattggacatggcggcgaagtccgggtttttcagctcggtgccggcgtccaggtagcccgccgccttcatttccatggcgacaaagcccagggacgagttatcgaacacgatgactttgactggcaagttcagctgcgccagcgagatgaagtcgcccatcagcatggcgaaaccaccgtcacccgacatcgagatcacctggcggcccgggaatgctgcctgcgcgccaatggcctggggcatggcgttggccatcgagccatggttgaacgaaccgatcaggcggcgcttgccattcatcttcaaatagcgtgcagcccacacggtgggggagccgacgtcagcagtgaagatcgcgtcgtcatccgccaactcgctgagcaagcgtgccacgtattgcggatggatcggtcgattggcctttgacggctgagccaggtcatccagcccttggcgggctttttcataatgcttcaaggacgtgtcgagaaagctgcgatcggtcttgcgcgttaaccgtggcagcagcgcactgatggtttcgctgacgtcagcggcgatgcccaagtccagcgtggcacggcgaccgagcgcttgggggttgcggtcgacctggatgatcttggcgtcggtggggtaaaactggcggtaagggaaatcggtgccgagcatgatcagcgtgtcgcagtcgagcatggcgtgataaccggagctgaaaccgatcaggccggtcatgcctacgtcgaacgggttatcccactccacatgctccttgccacgcagggcgtgcaccacgggagcgcccagtgcgtcggcgagggcgaccacttgatcatgggtgccggcgcacccgctgccgcacagcagggtaaccttgcggctgctttccaggatatcggtgaggcgttgcaggtcctgttccgccggcagtgtgcgcggtgcatgcagggcgggccacggcttgagtttgtcctcgacctccagcagcgatacatcgcccggtattaccaccacggccacgccgcgattgaggatcgccgagcgcatggcgcgatgcagcacctggggcatctgttcggggttggtgaccagttcgataaagtggctgcactccttgaacagttcttgcggatgggtttcctggaagtagttcaggccaatctctgaggatggaatttgtgcggcaatcgccagtaccggcacatggttgcgatggcaatcgaacagcccgttgatcaaatgcaggttgcccggcccgcaactgccggcgcacaccgtcagctcgccagtagccgccgcttcggcaccggcagcaaaagccgccacttcctcgtgacgcacgtgcatccactcgatgctgtccatggtgcgcagcgcgtcggtgaggccgttgaggctgtcgccggtcaggccccagatgcgcttgatgcccgcctgttcaagggtggtcgccaactgttgggccaggttgattttcgccatgaagaactccaatcgtcagtgaggttaaaaactgctgatcaataggggacagttcgatcacggcgaatgctccgcctttaatgtgaagattgcgtcatggctgcacggtattgccgggtgcgtcgggccagaaaccattggtcacgcaccagcgccatgcagggcgcgacgttggtcttgggcaaatggccgcggctgaggcggcgcatctggtagcgcaccacggcgagaatggccagggaggccaggggcttgcgcttccagtcgatgggtttgagttgcgggttggggtcgcggccttcgcgccagtgctggatcagttgtggctccagcgtcagggcggtggcgataccggccatggcgatgccgctgtcgagcacttgttgcacgatgggcaggcgacggatgccgccggtgaccattactggcatctgggcaatggccgcgacttcgctggcgaattcaagaaaatacgcctcacgggccagggtccggccgtcgcgtgcttcgccttgcatggccggtgcttcatagctgccgccggacaattccagcaggtcgatggacagcggattgagcatctcgaccacggcgcgtgcatccgcttcttcgaacccaccacgctggaaatcagcggagttgagtttgaccgacacacaaaacgacgggctgacacaggcacgcaccgcacggatcacgtccagtagcaggcgtgcacggttctccagtgaaccgccccagcgatccgtacgttggttgctcaatggcgacaggaactggctaagcaagtagccatgcgcaccgtggatctgcacgccggtgaagccggctttttcggccaggcgtgcgctggtggcgaagcgctggatcacgtcctggatgtcggcctcggtcatggccttgggcgtggcaaacatcttcgagaaaccgcccaggtcgagcgccacggcggacggtgcaatggcctgctggcgcaggttggcgggtgtctggcgtcctgggtggctgagttgcacccagaagtgcacgttcttgcgccgcgccacgtctgcccattcgcgaaagcgctgcagttgctgctcgtcctcaagggcgacgccgccggggccggtcatggcgcggcggtcgaccatcacgttgccgctgatcaacaggcccggctcgccatcggcccaggccgcgtagagctgcatcaactcaggggacggcgcttgccgggcatccgccatgttctcttccatcgccgccttggcgatacggttggaaaggacttggccattgggcagttgcagggcttcaaagggtgacatgggttgactcctgagcgggggaggcctcaggctaagcttaaaggtaactttaaggtcaagcaggcattcgatgaatattggcgaactggcaaaacagagtgggctggcggcgtcgcgtatccggttctatgagtcgcaaggcctgatcagtcaggtcgggcgccaggccaacggctatcgacgctatgcaccggaagcactgcagaccctgcaactgatccagagcgcgcagcaggccgggttcaccttgcaggagctcaaggcgctgatgcccgcgccaggggagcacaagcgtgaggagctgatcgaagcactggaacgcaaggtgatgcagatcgaagaaatgcaggcacaactggcccacagcaaggcgcaactactgggtgtgctcgaggcggtgcgagcgcagccggaaggggtgccgtgttcgatggggcagaagcaggtgctggcgtcgatcaagaccgatgatctacagagcaagtagatgccaatgtgggagggggcttgcccccgatagcagagggccagtcaacagattcattgactgatccaccgccatcgggggcaagccccctcccacatttgaggctcagcgccggcggaacaacggcagtggctcatccgttgccgcctggtacgtcaccgagaagtcctggagactttccagtgcttcgtacgggtctttgtccgcgcgcagggcgaaagcatcgaagccgcagcggcgcaggtagaacagctggtcgcgcagcacgtcgccgatcgcacgcaactcacccttgtaaccgtagcggtcacgcagcaggcgcgcgttggagtagttgcgaccgtcggtgaaggccgggaagttcagggcgatgacctggaagtgctccacgtcatcaccgatttcctcggcttcttcatcggcgtccagccacacgcccaggccgccgtcgcgggccttgagggcatggccgtgttcgcgccacagggccaacggcacgatcaggtcgtcgcagttggagatgccgtcgaagctcgcgtccttgggcagcaggtgccaggtttcgtcgaggacttcgttgttcttaatgattcgctgcatagacgcgctccttgaacaggtcgatgccgatgcgctggtaggtgtcgatgaaacgctcatcttcggtgcgctgttcgatgtacacgtcgatcagcttgccgatcacctcgggcatggcttcctgggcgaaggatgggccgaggatcttgcccaagctcgcatcgcggctggcgctgccacccagggacacttggtagaattcttcgcctttcttgtccacgcccaggatgccgatgtggccgacgtggtggtgaccacaggcgttcatgcaaccggagatgttcaggtccagctcgccgatgtcgaacaggtagtccaagtcgtcgaaacggcgctggatcgattcggcgatcgggatcgacttggcgttggccagggagcagaaatcgccgcccgggcagcagatgatgtcggtcaacaggccgatgttcggcgtggcgaaaccaccttcgcgcagctcgccccacagggtgaacaactggctctgctcaacgtccgcgagaatgatgttctgctcgtgggaggtgcgcagttggccgaagctgtagcgctcggccaggtcggcgacggcgtccagctgcttgtcggtgatatcgcccggcgcgacgccggtaggtttcaacgacagggtcaccgccacatagcccggcttcttgtgcgccagggtattgcgcacacgccagcgggcaaaacctggatgttctttgtccagtgctgcgagctcggcgtcctgattgctcagagccttgtactctgggtcgacgaagtgcttggctacgcggtgcacttcggcttcggtcagggtcgtctggccaccgcgcaggtgttccatctcggcgtcgactttctgggcgaagacttcaggggtcagggccttgaccaggatcttgatccgggccttgtacttgttgtcgcgccggccgtagcggttgtagacccgcaggatcgcgtcgaggtagctcaacaggtcctgccacggcaggaactcattgataaaggcgccgaccaccggggtacggcccaggccgccacccaccaggacacggaagcccagctcgcctgccgcgttgtgcaccggctccaggccgatatcgtgcacttcgatggccgcacggtccgaggtcgagccattgatggcgatcttgaacttgcgcggcaggtaggcgaattcggggtggaaggtggtccactgacggacgatttcacaccacgggcgtgggtcgatcagctcgtcggcggccaccccggcgaattggtcggtggtcacgttgcgcaggcagttaccactggtctgaatggcgtgcatctgcacggtagccagttcagccaggatgtccggcacgtcttccagcgccggccagttgaactgtacgttctggcgggtactgatgtgggcgtagcctttgtcgaagtcacgggcaatcttggccatcatgcgcgtctggcgcgatgtcagctggccgtagggcacggccacccgcagcatcggcgcaaagcgctgaacataaaggccattttgcaggcgcagagggcggaactcttcttcgctcagttcacctgccagatagcgtcgggtctgatcacggaactgcttgacgcggtcctcgatgatgcgctgatcgtattcgtcgtatacgtacatataggtcctgttctcggcaaatctgcgcgcacggccgcgcactcccaacggagccggcgcacgataccagtttgcgtttatgcgcaaaagtgatgtttgagtatatgcaaataaccaaattgactaatgagaaccgttatcgccatacccacatttgtcatgcgggcaatcgtcgactttactgtgagcgtgtttgagcgtattcaccgataaaaccgataagaggcgatgcgatgagcaatccgacaaaagcccgtaagcccgacagtaccgtggacgcctgggccattctgtttctgatcatcctggtggtgggaaccgccgtattctgggtgagccaccagtaaagagcctcgattgactgccgtgttgccactatcatggcggtcactattccaggctcgaaaaaccatgtcgaaggtgctgattgcgtgtgtgtggttgctgggaacggcgtatggggccatggcccatgccacgtcggtggtgtttctcaacccgggcatgtcgacggaaaccttctgggtcagctacgcgcaattcatgcaggccggtgccaaggacctcggcctgcatttgcgtgtgcgctattcagagcgggatgccaacaacacgctgatgcaggcgcgtgaggcattgcacggcagcgagcgaccggattatctggtgctggtgaacgagcaatacgtcgccccgcagatcctgcgcatggcccagggcagcggcgtgaagctgctgattgtgaacaacgcgctgaccgccgatcaggtgcgcttgcttggcaatggcgacggttgggttgccagcatggtcgctgatgatgaacaggccggctacctgatgctcaccgatctactacgccagcacggtaccgttgctgctggccaatccatcgaactgctggcgttctccggcaccaagaccaccccggctgcgcagttgcgcgaacagggcctgcgccgcgccttggccgaacaccccgaggtgcgcctgcgccagttggtctacggcgaatggagccgccagcgcgcctacgaacaagccacgctgctgttcaagcgctacccgcaggctgcgctggtgtggtcggccaacgatgagatggcgctgggggccatgcgggcattgcaggacagcgggcgtgtgccgggcagggatgtgttgttcggtgcggcgaacagctcgccggatatcctgcgggcgcggcttgacggtcgcttgagtacgctggtcgcggggcatttcaccctgggcggttgggcgatggtattgatcaacgatgatgcccagggtgtggatatcgacgcccatggcgggcgtgaccggcaggaggcgttattccaactgatcgatacgacccaggcacaacgcctgctcggccccatggcgccggtggatttccgcgcactgtcagccgtcggcaagccggcgtcctaccgatacccctttagcttgcaactgctgctgcgctagacgcccgccaggtgcagcaccagcttgacgataccgaacagcgtcaacgcaaacacagccgtgaacagaatgcccagcaccacaaaatggctgggcttgccgtgggtgaagtcgcgggcgcggttcttgccgctctgcacgccaaacgcggccgccaccacgctgtgcagcatctgccagaaggtagggggcttgttgttgactggatcgtccatacatccctcgacacaaggtgtgtgagggagagcatagacaatccagcggggcttagttgtcgtaacccaggttcggcgccaaccagcgctcggtcacgctcaggtcctggcctttacgcgccgtgtagctggtcacctggtccttgtcgaccttgcccacggcaaagtactgcgcctgcgggtgggcgaagtaccagccgctcaccgcagccgccgggaacatcgcgtagtgttcggtgaggaacacgccgctgcgaccggcctgcatctcgcgggcctcggggtcgagcagttggaacagttgggccttttcggtgtgatccgggcacgccgggtagccgggggcagggcggatgccgctgtattgctccttgatcagcgcctcgttgtccagttgctcgtccttggcataaccccagtgctctttacgcacctgctggtgcagccattcggcgcaagcctcggccaggcggtcggccagggccttgaccatgatcgagttgtagtcgtctcccgcgtcttgatacgccttggcgacttcttcggcgccgatgccggcggtggtgatgaagccaccgatgtagtcggtcacgccgctgtccttgggcgccacgaagtcggccagggagaagttcggcttgccgtcggtcttgatgatctgctggcgcaggtggtgcaaccgggcaatcggctggccgtcatcgccgtagacttccaggtcatcgtcctgcacctggttggtcggccagaagccgaacaccgctcgggcgctgatgagtttttcgtcgatcagcttcttgagcatttcctgggcatcggcgtacagcgcagtggcggcctcaccgaccacttcatcgtcgaggatgcgcgggaacttgccggccaggtcccaagagataaagaacggtgtccagtcgatgtactcggccagcaccttgaggtcgatattgtccagcaccttggcgccggtaaaggtcggcaccactggcgtgtagctgctccagtcgaactgcggcttcttggcgatggcggccgggtagctcaggcgttcggtgcgggcgctacggttggaggtgcgttcgcgcacttccacgtactcttcgcgggtacgctcgacaaagccggccttgagttccttggacaacagctgcgtggccacgccgaccgcacgcgaagcgtcggtcacgtacaccaccgcatcattgctgtacttgggctcgatcttcactgccgtgtgcgccttggaggtggtcgcaccgccgatcatcagcggcaggtggaagtcctggcgctgcatttcgcgggcgacgtgcaccatctcgtccagggacggggtgatcaggccggacagcccgataatgtcgcacttctgctccttggccacctgcaggatcttctccgccggcaccatcacgccgaggtcgacgatgtcatagccgttgcagcccagcaccacgccgacgatgttcttgccgatgtcatgcacgtcgcccttcaccgtggccatcaggatcttgcccttggcttccggcttgtcgcctttttccagctcgatgaacgggatcaagtgggccacggcctgcttcatcacccgggcggacttcaccacttggggcaggaacattttgccggcgccgaacaggtcgccgacgatgttcatgccggacatcagcgggccttcgatcacttcgatcgggcgcgcgaacgacagccgggactcttcggtgtcttcaacgatatgcgtggtgatgcccttgaccagggcgtgctccaggcgcttgttcacatcccagccacgccattcttcggtctcggcttccttgacgctgccgtcgcccttgtacttgtcggcgatggcgaggagggcgtcggtgccgtccggcgtgcggttgagcaccacgtcttccacggcgtcgcgcagttctaccgggatctggtcgtagatctccagttggccggcgttgacgatgcccatggtcaggccgttgcggatcgcatacagcaagaacaccgagtggatcgcctcgcgcaccgggttgttgccacggaacgagaacgacacgttggacacgccgccggaggtcagcgcgtagggcagttcgtcacggatataggcgcaggcgttgatgaagtcgacggcgtagttgttgtgctcttcgataccggtggcgaccgcgaagatgttcgggtcgaaaatgatgtcttccggtgggaagccgacttcattcaccaggatgtcgtaggaacgcttgcagatctctttcttgcgcgcttcggtgtcggcctggccggcttcgtcgaaggccatcaccaccacggcggcgccgtagcgcttgcacagcttggcgtggtggatgaactgctcgacgccttccttcatgctgatggagttgacgatgcccttgccctggatgcacttgaggccagcctcgatcacgtcccacttggaggagtcgatcatgatcggcacgcgggagatgtccggctcgccggcaatcaggttgaggaaggtcaccatggccttcttcgaatcgagcatgccctcgtccatgttgatgtcgatcacctgggcgccggcttccacctgttgcagggcgacttcgagggcttcggtgtagttgtcttcacggatcaggcgggcgaatttggcggagccggtgatgttggtgcgttcgccgacgttgacgaacagcgaactgcgatcaatcgtgaacggctccaggcccgacaggcggcacgccttggggatgtccgggatcacgcgtggcgcgtaaccggccacggccttggcgatggcctcgatatggcctggcgtggtgccgcagcagccgccgacaatattgaggaagccgctctgggcgaactcttcgatgaccttggcggtttccgaaggcagttcgtcgtactcgccgaattcgttgggcaggccggcgttggggtgcgcggacacgtgggtgttggccttgttcgacaactcttccaggtacggacgcagttcgctggcgcccagggcgcagttcaggcccactgaaatcggcttggcgtgggcgaccgagttccagaacgcttcggtggtctggcccgacagggtgcgaccggaggcgtcggtgatggtgccggagatcatgatcggcagttcggtattgagctcctcgaacacaccttgcacggcgaaaatcgcggccttggcgttgagggtgtcgaagatggtctcgatcaggatcaggtcggcaccgccttcgatcaggcctttggtggcctcggtgtagttttccaccagttcatcgaaggtcacgttgcggtagccggggttgttcacgtccggcgacaacgagcaggtccggctggtcgggccgagcacgccggcgacgaagcgtggcttggccgggttctccagggtcttggcgtcggcgatcttgcgcgccaggcgtgcaccttccacgttcagctcgtaggccagttcttccatgccgtagtcggccatggagatgcgggtggcattgaaggtgttggtttcgaggatgtcggcaccggcatccaggtaggctttttcaatgccgccgatcacgtccgggcgggtgatcaccagcaggtcgttgttacccttgacgtcgctcggccagtcggcgaagcgtttgccacggtagtcgtgttcttccagtttgtagctctggatcatcgtgcccataccgccgtcgaggatcaggatacgttccttgagggcttgatgaagggcttgcagacgaacgctacgatcggacatgggactactctggtcaggcattacggagggcgtggatcataacaaacctgtgcggctttgcagcatgcccggtttttacatgaatatcgctcatgttgcaggggcgcatggcccggtagaatcatcggcaatttttcagcgcacgcattgaatcgggaccggatacatgtcacttcgcctcatcaccagcgccgtcctggcactggttgcctgcatcgctcaggccgacggatccgccccggcgatttcctacacccgcgacattcaaacgatcttcaccgagaaatgtgtggcctgccacgcctgctacgactccgcctgccagctcaacctgggcagtgccgagggcgcggcgcgcggcgcgagcaaagtgccggtctacgatggcgaacgcagccaggccgcgccgaccacccgcttgttctatgacgcctttggcaaacaggcctggcagcagaagggcttctattcagtgctggacgcccagggcagccaggccgcgctgatggcgcgcatgctggagctgggccataacgcgccgttgcaacccaacgccaagctgcccgaagacattgtgctgggcctgaaccgcgagaacatgtgcgccatgcccggcgagttcaacgcctacgccggtgcccaccccagggaaggcatgccgctggcggtcaccggcctgaccgaccagcagtaccagaccctgcaacgctggctggcgtccggcgcgccaattgatgagcaaggcctcgcgcccagcgcgaaagaagccctgcaagtgcagcagtgggaaaacctgttcaaccagcccggcgcccgcgaaagcctggtggcgcgctggttgttcgagcatttgttcctcgcccacatctatttcgagaatggcgagccggggcatttcttccagtgggtgcgttcgcgtacgccgagtggccagcccatcgacctgattgccacgcgccgtcccaatgatgaccccggcacccgcgtgtattaccgcctgtggccggtgcagggcgtgattgtgcataaaacccacatcacctacccgttcagtgccgagaagatggcccgcatcaaagagttgttctacgccggcaactggcaggtcaacgccttgccgggctacggtccgggccgccgcgccaaccctttcgaaaccttcgaagccatcccggccaaggcgcgctaccagttcatgctggataatgccgagtatttcgtgcgtacctttatccgtgggccggtgtgccgtgggcagattgccacggacgtgatccgcgacaatttctggaccctgttccaggacccggaccacgatctgtacatcaccgatgcacgttatcgcggccaggccacgccgctgctggccatgccggggcagaacgatgacgtgggcagcgtgctcagcctgtggctggcctaccgcgataaacgcaacgaatacgaagccctgcgccgtgacagctacgctgacctgccgccgccaagctggtcgagcctgtgggcgggcaatgacaatgccttgctgagcattttccgtcacttcgacagcgcatcggtcagcaaaggcctgatcggtgaagtgccgcagacgatgtggctgttcgactatccactgctggagcgcacctattaccaactggcggtgaactttgatgtgttcggcaatgtgtcgcaccaggcccagacccggctgtacttcgacctgattcgcaatggtgccgagcagaacttcctgcgattgatgccggccgattcgcgcgatgatttcctcgacgattggtaccagaacagcggcaagctcaagctgtggctggattacgaggccattgatgacgacaaacccaccggcctgcacctgaacgaaaaggatccgaagcgcgactttgccaaccagttgctcacccgttacggcgatttgaatgccagcccggacccgatcaaccgttgcagcggcgcctattgctcccgcgatgggatcgacccggccttgcaggatgcggagcaggcactgagccgcctgacctcacgcccagctgccgggctcaaggtgattgatcaattgcctgaagcgacgatgctgcgggttgaaaccgccagtggcaagcgtgtggtctatagcctgctgcgcaatcgtgctcacagtaatgtcgcgtttctgctgggcgaggcttatcgctatcagccggggctggatacgctgacgatttatccgggtgtgctgagcagctacccgaactttatgttcaacataccggcacaggaagtgccggagtttgtggcggaaatggagcaggccaaggatgccaagggtttcgagaagattgtggatcggtggggggtgcggcgcagtcatccactgttctggcagtatttccatgatttgtcgcagtacattcgtgagactacgccggtggaagagggcgtattggacatgaaccgctatgagaacctataactaatggcagtgatccagtcatctctctgagcgggtgctgaagcggtcggatatctatcttacgggattgcaaaggaagctccgactatgttgatttcagtgcaggcgctaagagcgttggctgcgtgggtggtggttggacatcacttcattcaggtgtttttcaactttgaagtggatacgcctatggcgtatctgttcgccgacaaaggcgccgttggtgtagacgtgttctttgtgatcagcggcctggtgattttcctggcgaccgccgacaaggcactgaccccctggcgtttcatcctcatgcgtttggcaaggatcacgccagcgtactggttctataccctgctcatggctttgttgctgttggctgtgccgtcgctgtttgcagaaacccacctcgagacgagtcatctgcttctgtcgctgctgttcattcctgctcagaacccaggggggtttggcgtctatccgctggtggacgtcgggtggaccctgaatttcgagatgctgttctatctactgttcgcctttgccttgctagtgcggcggtcatatcggttatgggtagtggcagcgctgctgtacttggcgtgttacctcatcacgccggccttgaattgggccgacggcttttaccggaatgacatcgtcttcgaattcctgatgggcatcatgatcggcatgctctactgctgcggggcgtgccggaccccaccatggctgccggtgctgggtatcgtggtggcctcagcggcgatttatcacggggcggatttgcctcgtgcgctggagtggggagtgcccagcgcggtattggtcatcagttttgtggcgttggaaccatactttcacggatcacgattgttgaagctgctgggtgactgctcttactcggtgtatttgctccacacgatggtgctgtgcgtcgggcgatggttcgctgagcgcaacggaattgatccctatgcgatgttgcccgtttgcctcgtgatgacagcagtgtgtgcatttttcagctaccaatggctggagaaaagcacctatctctggcttaagcgttggtttggcatggaggatccggcaatcctttcccgacaaaaatactaggactttgtacctgcgtaatattttggcgtaaactgccggcaagcctgtgaggagtttccatgactgccataaccattaccgacgccgcccacgattacctggccgacctgctgtccaagcagaacaccccgggtatcggtatacgcgtctttatcacccagcccggcacccagtatgccgagacttgcattgcctactgcaagcccggcgaagagaagcctgaagacaccgccctggggctgaaaagcttcaccgcgtacatcgacgccttcagcgaagccttcctggatgacgccgtggtcgattacgccaccgatcgcatgggcggccaattgaccatcaaggcgccgaacgccaaggtgccgaacgtcaacgccgacagcccggtcaacgagcgtatcaactactacctgcagaccgagatcaacccgggtctggccagccacggcggccaggtcagcctgatcgacgtggttgaagacggcatcgccgtgctcaagttcggtggcggctgccagggttgtggccaggcggacgtgaccttgcgtgagggcatcgagcgcaccctgctcgagcgtattccggagctcaagggcgtacgtgacgtgaccgaccatacgcagaaagaaaacgcctactactgagtaaggcgttcactgcggacaaaaaaacggcgccccgtgagcgccgttttttatgctttaaattcagtaagttgcaccatttatctaatgtagagtgttcgtcgcgaaaacggcagtccgattttttgtgaatgaatttattaaataaaatcagtagtttatgtttgtcttgtgatgttgagcatcaaggtcgatacagatgcgcatgccccgcccgatacaacgatgactcactgaaactatcactcgccaacacccgacccaccacaatcaacgccgtacgccgaaaccccttggccgctactttttcggcaatgtcgctgagagttccaacaacccaatcctgatccggccacgtcgcccggtgcaccacggtaatcggacaatccgccccgtagtgcggcaccagttcggcgacgatcttgtccaggtggttgacccccagatggatcgccatggtggtgccatgtcgtgccaggctgtcgaagtcctcaccggccggcatgctggttttatccgcatagcgggtcagaatcacgctctgggcgatgtcgggcagggtcagctcggtttccagcagggccgcgcaggcggccaccgccgtgacgccaggaatgatctggaacgggatgcccagctcgcgcaaatggcggatctgctcgccaatcgcgccatacaggctggggtcgccggaatgcacgcgcgccacatcctggcccttggcatgggcggccctgatcaggtcgatgatctgttccaggtgcaattcggcgctgttgaccactgtttccgcctgatgaccttccagtaccgccgccggcaccagcgagccggcatagatgatcgcctggcaactgcggatcagccgctggcccttgacggtgatcaattccgggtcgccggggcctgcgccgatgaagtaaacggtcatgggaaatcctgatgaaaaacgggtgagcatgaaatctgctcatgatcggaagcggcgattatcgggttttcagtcggcgcacgccaatgcaaaggtggcctgggcggttttctggcgggtgatcagcaggcgcgcaggggcgttggcgaggtgttcggccagggccagggcggcgctttcggcgatgccgtaacagccggtgtgggcaaaagccacgtccgattgatggctcaagcggtctgcataaatcgccagttgttcagcgttgaagcactgcaacggcagattcagcagcgcggccaaggccagcagcccgggttcttcctgtttgtgatcgatgctggccagcgcactgacgcggtggcgctcgataccgccctcgatgagggcagcatcaaacagggccagcagggtgtgaacatcacaaccccgctggcagcccatgccgactaccagtttcacgccgagtattgatcgtcacggttgcggcggaacagccaggcgctgatcaggcccaaggccagccagaacgccacgttggtcaactgtgatgcgatcttgaactgcgcttccagcgcctccgggaccagcatcgaatgcacttccggttgtggcgcgccgatcacgtgcggcactacgaggatcgcggcgcccagcgccttgagcagccagttgcgaccgaacacgatcagtgcgataccggctgcggtagacgcggcagtaccgatccaccagatctgccgttgtgccaggtcagcggcggcggtgcccggcagttcgggcggcaggcccagggtcggcgccaatacaaaggtcgcataacccgccaggccccagagcaagccttgagaggtacgggtcggtgcacgcagggtgtacagaccggccagcatcaacgcgaagccaacggcgaccaccaggttgccgcctgtggtggacagcacgcgctgccagccgtcttccggctcccaggcttcggcgtcgtgggtgtgagcagccgcaccttcggcgtgctcgtgcaactcggtcgctgccggggctttttcaaaggtttccgcctgcagaatcagcggggcgacccagaagctttgcagcagggtcagcagcagggcagccagaaggccggtgaaacctgcggtttgcgcaatacgcttgatcatgtcggcaggtctcagtggcacgggaacgcggcgctgtggcgggtatcgtgggcagcgttgtgtactgcctcgatgtgcgagaaaccggcgaagtacaccaggcacgcaccgaggatcgacgcaccgatggcggcggtcaggcgttggctcagggtagaggtgctgctggcggagtgcgaagtgctgctgatgatcgacatggcgcgtccctttcaggtgtcagggtgaaacgagcgcatgaaaaccccgcgagccaggcacgcagggttctgaacagcgcccgcccaccgcgggtttgttatctgattttttcgggccggtctccgggcttgcgaggggctcaatgcctgaaaacgtcgccttcccatgccgcctggcacagtggatatgacgtttcgctcgcttaccgttgcgggggcagcaccggactgtcatgtgtgtgcatgagtcaccggtttcccgtttcaccctttgcagggcacccgaaacaagatgtgtaggagagcatgggggtgggaggggagtcaattggggatgtgttttctgggggcatatccgttgctgcggtaacggcggcttagggttccgcccttacggcggcccacgtattcaagcctgcgttcggccagcgtgtttgacggggcgaccccagatcaaaagcaagagcgcggcggccttagagccgaccggattgtatggctggtactcggtcaaagtgtgggagggggcttgcccccaatggcagtgggtcagtcactgatgagttggctgatacaccgccatcgggggcaagcccccgcccacaggttga

SEQ ID NO: 40 - DNA, 567 bp, Pseudomonas nodulensis
tcaatcccagctcagcgcgccgccagtctggtactcgatcacacgggtctcgaagaagtttttctctttcttcaagtccatgatttcgctcatccacgggaacgggttggtggtacctgggtactcttccttcaagccaatctgcgacagacgacggttggcgatgaacttcaagtagtcttccatcatcgccgcattcatgcccagcaccccacgcggcatggtgtcacgagcatattcaatctccagctgagtcccttgcaggatcatctgggtcgcttcttccttcatctcggcatcccacaggtgtgggttttcgatcttgatctggttgatcacatcgataccgaagttcaggtgcatcgactcatcgcgcaggatgtactggaactgctcggccacgccggtcattttgttgcgacggcccatcgacaaaatctgggtgaagccgcaatagaagaagatgccttccagcacgcagtagtaggcgaccaggttgcgcagcagttctttgtcggtctcgacggtgccggtttcgaacttcggatcggagatcgagcgggtgta

SEQ ID NO: 41 - DNA, 715787 bp, Pseudomonas nodulensis
  misc_feature (47746)..(47776): n is a, c, g, or t
  misc_feature (175997)..(176032): n is a, c, g, or t
  misc_feature (179110)..(179110): n is a, c, g, or t
  misc_feature (179120)..(179120): n is a, c, g, or t
  misc_feature (291399)..(291438): n is a, c, g, or t
  misc_feature (452947)..(453022): n is a, c, g, or t
  misc_feature (457115)..(457181): n is a, c, g, or t
ccgcaatagaagaagatgccttccagcacgcagtagtaggcgaccaggttgcgcagcagttctttgtcggtctcgacggtgccggtttcgaacttcggatcggagatcgagcgggtgtatttgaggccccaagcggcttttttggccaccgatggaatctcgtggtacatgttgaagatctcgccttcatccatggccagcgattcgatgcagtactggtaggcgtgggtgtggatcgcttcttcgaaggcctgacgcaggatgtactggcggcactccgggttggtgatcaggcggtacacggccagcaccaggttgttggcaaccagggagtcggcggtggagaagaagcccaggttgcgcatgacgatgcgacgctcgtcgtcggtcaggccttcggggtttttccacagggcgatgtcggcggtcatgttgacctcttgcggcatccagtggttggcgcagccgtcgaggtacttctgccaggcccaatcgtacttgaagggtacgagttggttgaggtcggcgcggcagttgatcatgcgtttttcgtcaacggcgacacgggcggaggcgccttcgagttcggcgaggccttcggcgacgtcgagtttgtcgagggctgccttggcgcggacgatggcggcggagtcgttggcggtcacgttacgggcttccagcgcagcagcggcgccggcaccgtcgaggcggtccatgttggcttcgctggcgtggccggcgttggcgcccttgatcaccgctgcaccggtgtcttcgttgtcgacttcatcccaactcagcatggaaatgctccttcctggtattcgaaaaataagtgtttttgcaggcttcaaggcattgaaatactgcgcatagtgtggtcgataaataccgatactgcacactatgtagtggtctgttctgtttgtgggcacactatatggtgtgtaacaagactggtcaacgtgcaggaatcacgcaggcctgctttaaaggctgatcttgatctgcgcgcacaacccaccttccggccggttgctcaacgtcaacgaacccccgatggccaccaccagttgctgggcaatcgccagccccaggccggtgccgccggtgccgcggttgcgtgagctttccacgcggtagaacggctgcatcacctgcaccagttcgtcctcggcaatgcccgggccgttgtcgagcaccttgatcgacagtgcaccatcggccgtcgaaccgacctccagttgcgcggcgccggcgaacttgagggcgttgtccaccaggttcaccagcacccggcgcagggcgtgggggcgcgtgtcgagtacgaccgcgcttttgccgctgaggctcacctgtttgtgcatgtcctggtagtcgaacaccaggctgtcaaggaaggcgtcgaggttgatgcggtggctggcttcggtggcgccgtggacgctgcgtgcgtaggccacgccctcgcgcacaaggtgctccatctcgccaaggtcgctccagagtttgtcgcgttcggcacaatcctgcatgaattcggcgcgcagtttcatgcgcgtgatcggggtttgcaggtcatgggaaatcgccgcgaggatctgcatgcgctccttgaggtattcggcgatgcgctgttgcatggcgttgaacgcaaccgcagcgtgggccacttcggtggggcctttttcgtccagcggcgtggggtgggcgttggggtcgagggtttccacggcgcgcgccaggcgggtcagcgggcggatggccaggcgcacggcgaaccaggtgcagcccagcagcagcgccagttgcagcaccagcaccaccggcagccagtacgcgacgggcagggcggcgggacgtacgtcgagggtgatcgggctgccatcggccagggtcaggtgtgcctggaagtgcttctgcatcccggggatgtcgcggaaggtcagcgcgtagtgttcacccaatgcatcggcaatcgaggtggcggccatgggcacgtcgtcgctgcgcatcggctcgccggtttcgccggcgttgagcaggtagcgatagttttgccggtcgagacgcggcagccaactggcgcgctcgttggcgggcagccggtcaaggatcgccaccgaggtggccacgtcgttttccaggttgcccagcatgacggtgcgcgcgctgatatagcgctcatagaactgcgcactgaaggacaagccatgggcgcacaccaggctgatcaggaagatcagcgacaactgcgacgccagggtacgcggccagccaaaccttaaggtcattgatcggccccgaggatttccaccggcagggagaacacgtagccctcgctgcgcacggtcttgatgtaggccggttcgcgggcgtcgtccagcaggcgttggcgcaggcggctcaccagcaggtcgatggaacggtcgaacagatcggcgtcgcggccctgggtcaggttgagcaactggtcgcggttgagcacgcgttgggggtgatcgaggaacacccgcagcaggcggtattcggcgccgctcagggcgaccagggtgtcgtctgcgtcgagcaggtggcgggcggtggtgtccaggcgccagcggccgaagcggatcagccgcccggtctcgctgactaccaggttcggcggcagcattcgtgtgcggcgcagcaccgcgttgatgcgcgccagcagctcacgagcggcgaacggcttgaccaggtaatcgtccgcgcccatttccaagccgatgatgcggtcggtttcatcgttgcgtgcggtcagcatcaacaccggcgtggctttgtgcttgcccacccgcagctcgcggcacagctgcaaaccgtcgtcgccgggcatcatgatgtccagcacgatcaggtccaccggggtggtatcgaggaagctgcgcatctggcggccgtcggcgaccacggtggtgcgcatgccgttctttttcaggtagttgcccaccagttcgcggatttcccggtcgtcatcgacgatcaggatgtgatcgacatgatccatgctgcctccctcgttaaatgctcgttggggcgcagtctagccattggcgacggacttgccttgtgccctttgtattgcagtgtatctggcgataaggagatacatgacgaggcaaaaataccggcgtgaacgcctacagggtgcgcgaagcccccggcaacagggcttcaaacacttgctgcacctggggatcatcgctgtgggccacgttgaaacgcatggcgtcacggtgcgtcgcgtcatagccaaacagtgtgcttggcgccagcaccatgccctgtttcaaaccttcctgggccagtcgttcgccgttcacgccgggcggaaggagcgcccagataaacatcccgccttcgtagcccatcggcagttcgcagccgcaacgccgcagccattgttcgacccgtccaccggcctccatcaagcgctgcaccatgcgtttgcggtgcctggcgtaactgccttcgctgagcatgtggtacaggagctgctcgaacagctccgaggtcacgccgccactcatcagcttcatattggtcaggttggccgccagttgcggtgccgccaccacgaagctgacgcgggcgttggcgctcaggctcttggagaagcccgacaggtaagtgacctggtccaggccggcgagggctgccaggcggggcggtgggttggggtgcaggtcgccgtagaggtcgtcctcgacgatatggcaagcgtattgctgggtcagttgcagcaggcgaaacgcctggccggggctgaaggtatgaccggtcgggttttgcagcacgctggtggtcaggtacaggctgggacgatgttcggccagcaactgttcgagggccgcgaagtcaaaaccgtcgggacggcgctggatcgtcaccaccttgaccccgtgcagcgccaggttggcgtggaagttgaaatagcacggcgtgtccagcagcacggtgtcgccggggcgcgccagcaggcgcatcaacatgtccaggccttgcaccgtattgggggtagtgatgatctgttctaccgagaccgacaaaccttcgccgtgcagtttctgttgcagcgcctggcgcaacggcagcagcccggccggcgtacccatcccggcgatacgtaacgaaggcgcacgcaccacgctgcgcatggcttggcggatcgcttcgctgtccagccaggcctcgggcaagtgaccaccgccggggcgcaggtcaccgtagaccgtggcaagggggcggcgcaagacgctcaacaggtcctggggcagcaactcgacccaggcggccagggccgggcggacgcggtccgcggcgacgaaatagccgcggccctggctggaggtgagcaggttgcgcccgcgcaggcggtcgagggcttcgttgagggtgaacttgctcacgcccagggtctgggtcagttcacgcaccgagggcaacttgctgccgggtgcccattcgccgttttcgatggcctggctgaacgcctcgacgatctgttgcactttgggggtgccctctacaaaggcgatggccgatacgaacatacagcttccttatctttgccggtgattttaccggtgaagttcgggcggattaggcctcactttacctgccttgcgcaacgccgactgcctagactgcgcgctctattcctcaggtctatggccatgacaagcgtgttgaccctttcgtcgtttctgtacttcctgctgttttgcgccaccatcaccttcagccccggacccatgaccctgctgctcttgagcctgggcctgcgcgacggcctgcgccgttcgatcccggcgcagatcggcgccagtgtgtcgtacctgatttcgatcctggtctttgccgtgggcttctcggagttgatcaagggcaacctggcgatcacccagggcatccagctggtcggcgtcgcctacatcctctacctggcctacaaacagtggaccagcagcggcctggcgctggaccgtgccggtgcggtggagggcgcgcgcagcctgttcggcaagggcttgcttaccgggttttccaaccccaaggccatcatcctgttcagcgcggtgttcccgcagttcgccggcgtgggggggcacagttcggcggtggacattggcattctcgggctgacgttcctgttgctgcaattcgccagcggctgcctgtattgctacttcggccagcgcatcaagcacgtcttggaaaaccccaggcggcgtgtgctgttgcaacgcatcacggctgttttgctgttgggcgtggcgttgatgctggcgcggggctttgcccactgagcttatgagcggtagtggcgaattgccggtgcgctgatagactcctggcattcactcaggatttcccccccccccatgtcagctgcagaaggaaacggacttccgctcgcttcacggctgtacaaatcccgcaccctcgggctgacgctcggttttgtctgcgtggtgttcgggatgtatcccctggaccccgcctggtgggtgtgggcctggatggtgatcaacgcgttcatctggccgcacctggcgtttcaattgaccttgcgcaccaccaacgcactgcgcagtgaacggcgcaacctgctgttcgattccttttgcggtggcttctgggtcggcgccatgcacttcaacccgctgcccagcgtgaccacgctgtcgatgatgaccatgaacaacgtggccatcggcggtccgcgcttcatgctggcggggtggctggcgcaggcgctgggtatcggcgcggcgctgctgatcttcgcgccggcattcattgccgtgaccagccaggcgcagctctacgcctgcctgccgatcctgatgctgtacccgttggccctgggctggatctgctaccgccaggcggtgaccctggcccgccacaagcgtgaactgttggtcctgagtcgcaccgacagcttgtccggcctgctcaaccacggcgcctggaaggaccaccttgagatcgagttccagcgctgtcgccgggattcggtaggtgccgccatcgcgctgatcgacatcgaccatttcaagaccatcaatgacacctacggccatgtcaccggcgatatcgtcctgcgccagctgagcaaagtgctgcgccagaacctgcgcgccaccgaccttgccgggcgttacggtggcgacgagttctgcgtgatcctgccgggcatgccgctcaaccgcgccaccgaagtgatggacgccttgcgcgatcgcttcaacgccttggcctacgcccaggacccgaccctgcgcgccagcctgagcatcggcctggcgccgtatcaaccgacccacgcggattcgaccagttggctcaatgacgccgaccaggccttgtacgacgccaaaagcagcgggcgcaaccgtgtcagtgcggtgcaggagggttggttgcgatcggtctagtggggtagggtgtctcggcacctccaacaaaaaacaaggatcggttcatgctcttcactttccgccgtaccctcctggccgccaccctggccatgtccttcgccgtgccggcctacagcgccgagccccataaacagatccaggcccaatccgaacactacaaggccgacgccctgaaactgctggagcgcctggtcaatatcgactcgggttcaggttatgaaccgggcctgacccaagtgcgcgacatcgccgtggatgagttgaaacagctgggcttctccatcgagctggtgccggacaaggccgccaacaacagccacgtggtcgccaccctcaagggcaccggcaaagccagaatcctgctgatggcccacatggacaccgtgttcaaggaaggctcggccgccgagcgcccgttccacatcaaggacggccgcgcctatggccccggcgtgatggatgacaagggcggcatcgtcgccggcatctacgcgctcaaagtcctcaaggaccagggcttcaaggactacgcgcaaatcaccttcctgctcgacgccagcgaagaaaccggctcggacgccgcctccgagctgatccgccaaaccgccaaggcccacgacgtcaccctgaacctcgaacccgggcgcccagccgacggcctggtggtgtggcgcaaaggcagcgccaccgctgtggtcgaagtcaaaggcaaagccgcccacgccggcgtcgccccggaactcgggcgcaacgccgccatggaagcggcgcaccagatcctgcaactgggcaagttgggggatgctgagaagaaaaccaccatcaacttcaccgtgatcaagtcgggcgaccgtaccaacgtcattcccgaccaggccaccgccaaggccgacgtgcgcgcggcattgccggaagagtttgatcgcatcgagaaagacctggcacgggtatcggccaacaagttgatcccggaaacggaagtgaagaccagcttgcagcgtgggctgccaccgatgccgcagacgccggagtcggacaagttggtggcgattgcccaggggatttatggggaattgggcaggacgttgacgatcgaaggcagtggcggcgcggcggatgccagcttgtcagccggggtagggacgccgacgttggacgggtttgggattgtcggcgggaatattcacacaccggaggagtatgcggaggtggagagtgtggtgccgcggttgtatctgttgagtcggatgattatggaactgagcgagcgctgactgacgctcttttgtggcgagcaggcttgccctgcgttgggctgcacagcagccccaaaacagacaatgccggtttatcagaaaacactcatcgcctggattggggccgcttcgcggcccaacgcgagcaagctcgctcgccacataagcgggtatcgcgtcctttggcaccggttagattttttcatttttaattttggaggttctatttttaagtgttgacacgacatgcctcaaccaagttaggccgtcaggccattcgctgcgataataatagtagcaacctatatcgctgaataaataagcttccagctcttgctctgtctttccgctgcgcattaacttatctagttctgtttgtacttttaatatcgtgtcttcagatgagtcggagacgaaaaactctataacatcgtccgctttttcgtggtcgtcaacccagtcttgattgaagtaaccagcaaaaaactgttgtggttcgggatagtattggttcatgggtttgaaaatccagtatgaattcggtagccagtatgcatgttaggggctttacggattatcaggtaaatttcctttcccgaaacggctgatgtgctgttctttttgaaacttgtacctacgggatgtttggttttttgaatgatgatgatttgattgtttttcccttttaaaaagttatcgattttagctttgttttcatccagtacggtcgatatttcccgctctgctgttgctctgtcatggaaggctgaggcagccgggatgtgtggctcttgttgtggtgagcaggcttgccctgcgttgggctgcgcagcagccccaaaacagacaatgccgatttacctgataaacacccatcgcctgaatggggggccgcttcgcggcccaacgcagggcaagcctgctcgccacagaggggttgtgttgccttggagggcggtgtttggtttaccaggttgactggtcttcgaggctggctttttgaaggtcttctttccagaccttgttggcgagtcgatagatgtcgacgaagaagcctcgggggtcggctatttctgtttcggtccaagccatggttatgtacttgtcgtaatcgttctcaaattctttcgaaaagtcaaagtcggggttgtctagtgcgtctttgagagaagaaatcaatataaaacgatgcctgtaggaaaggtgcataaggtctttcaggacgaaagaaattatgattttttccctgtcttgatgattgttagggtcatgcttccatagctcttttccaaccgtttcctcaaggtcgtatatcgataaggctcctaataaatgagagacattaggagtgtatggtgtgtccatgaatggggatttcagcatggtctgctcacttcgggaaagcggtgaatggtcgagtcggattgtgtcgatcaaatctgatttctgctctgtccatgttttcaatgtatctggggttgttcaagtccccggtattaggtttatagcctcgcccggccccaggcagttcgaccacgaccactgggttgcctgcattatccaaacctgtgggagatggcgaatcgccctgcatcctgcccaaggccttgtttatagcgtggagttgcattttccaagagttaaattgggagctggagctgatatacccgctctccccagtcgttggatttgttccatcaatagatcgttgttttaacgcgctatctggtatctctgggccatgcttttcaaccgtatgcatatcgtattcctgctcccagctcagcacccttcgttttgcatttgcctctgtcagtgcatctattctcgactgtccattagttcgcggtagttgaggtagagcaggtgcgccttcatcgacgttaggcctccgaagggtaggaggaacgttaggtttacactcgtcgccagggcagctacttaagcccagcggatctacccatccggtagggttaggcacgtactggtacgcattgatcccacccgccagcttcaccggatccggcgtcaggtaacggccaacatccggattgtagtagcgatggcggttgtagtgtagcccgctttcctgatcgaaatactgaccctggaaacgcagcgggttgtcgatttttccgatgtcgatgcggctgatttcgccgtaggcacggtaatgcgtagaccagacgatttcgccatccggggcagtgagttcctgtggggtgccgaggtggtcgagttggtagtggtaggccttggtttcctttggaccgaaaccttccaataaagccagcgggcgaaagctgtccggttcgtagaggtagctgcggtgccgatccgcgtggtgttcggcgatgagtttgtcgccttgccagaagagttcggtcgtaatcccatctacggttttactgatacgccgcccaaacgggtcgtagcggtagctggcagtctggccgttgggcgttttaatgccgatcaggcggtgctgacagtcgtagcggtattcggtgacgagggcgtggcctttgccgcggcgttcgcggatgaggttgccgaaggcgtcatagtcgtaatggtggtcgccctggatcatcaggcggttgccggcgacgatgtcggggccggggcggttgtgcatgagcaggttgccggcggggtcgtggccgaagcgttcctgttcgtcttgagtgtggtcggcgcgggtaaggcggttgagtgcgtcgtagtggtagcggtgttcgcctttgcgggtatcgagcaggcgggtgaggttgccggatttgtcgtagtcgtagtggcggcggtagagcgggccttcggcgtcattgatgctctggttgaacaggcgtccctggtggtcgtgttggtagtggctgagcagttggccttgttggcgttgctgttcgcggccggccttgaacaggtgtgaggtaagaacagcgccgttcagttcgacggtggcgaggtggccgcctttgtcgtgattgaaggtgaggcggttgttgtccggcaggcgcaggttttgcaattggccgcaggcgtcgtaggcgtagcgcagcgtgccccagccttggtgttcggcggtgaggcggttttggctgtcgtactcgtaggccagggaccagtggccgtcttctacgcctaagagattgccttggcggtcgtaggcgtaatcgacggtattgccatcgggcagggtttttctgatgaggcgtccggcatggtcgcgctcgtagcgggtaaccagctgactgccgtcatcgccgtgttcggtcttttccgaaaggttgccattaaggtcgtaaacgtaagcggtgcgctggccgtcaaacccggtttcctgctggatcaggccgttgttgtggtactggagccggtaggtctcgccaacttcgttttcgatttcggtcagcagtaaccgcgcgttgtcgtagcggtagttgacctgagtgccatcggcattgatgcggcggctgatcaggtgcaggccgtcggcgtattcgtagcgggtgacgtgcccgagttcatcgcgctcggcggtgatttttccgtaagcgttgtagctgtattcccgatgcgcgccgcctggcagcacaacgcgaatcaaccgacccacgctgtcccactgatactgggtcagcgcgccatgttcatcttcccgcgcaatctgtcgccccagatcgtcatagcgataacgcttgatcccaccattgggcaactgctcctcaagcaactgcccacgctcattccacaccagccgatgacagctgtggtccgggtaccaaaccccaaccagttgcccgtatttgttgtagctgtagtcagtagtgttgccatcagaatcggtcttgcgcgttacatcgccttggtcgttgcgctcatacttccaaaccgcctgaccccgccttacaacgcgtacgaacccgttgtcatgctcgtaggtcgtcggctcatcgtcccccggaaacaccgccaccaagcgcccagcttcgtcgtactgatacgccgtgatcgccccgagcgggtcctgctcaaccgtcagccggcctttttcatcgtaggatttgaaatgctcggccccgtcaggatcaacccgctgcaccagccgcgcccgttgatcgtgaagatagacttcctggctgccatcggcgttaaacaccgtgacctggccgttgtcatcccaggcatagcgcgtgtccatctgcgagaagctggcccaatgccgcacacaccgcgccgccttgccagaccgttcccactcccaatagaaactcgccccaccggccaagtcgcgttcaagaatgacgtgctgttcgtcgtaccgataaacctcgctttcgccgatggcattggtcgcgcaaatcagtcgtccagcttcgtcgtaggtgtaggaaacaacggtctgttccgtcacccactcaaacggctcgagacctttagcccgatgaacctgatagtccaccgccacgatgcggcccgacgcatagcgcaaccaaagcgaacgcccgacaccgttatccacccgctcaacacgccccagaaaatcccgagtgatacgcagccggttgtcatacgcatcgctgatcgccgtcagcacaccgtcgcggaagtggtagaaacgtgacgcctgcgccagcaccagttcatcgggcgcagcacccaaatagatcgccgcttcggccaggctattggtgatcgcaggtcgagaggcagtaggcaagggcagggtggtcgaccgattctcatgatcggtccacaccatcgaatcaccctcaaccaccagccgatgcgccagcgagtgactccagccaaaccccagcccgcaatccattttcaccgcactggtgcggtacaaccgggtccactcaaacggcaagatcccgtccagcgtcccatcggtaagggtcagcaattcctcgccggtgaccatcgacaccgggcagccgttagtggcggtcttgtccgcaggcgccgccgcatccccattcgggtttcgagcagaagccggcacatcatccacaggctcctgccgcaccagcaccgtccgctgcgtggccttatcccgaaccaccggcaccgcgttggcaaccacctgatccccagccttcaacggcacatccggaaccaccctgatcggcgtcgcacgactccccagcagcaacggcctggccgcctcgacatgcgcgtccaaccgaggcccgaccaactgttccgcgagcatctccagccactggcgagcccggccagacttgatgtgactcgtcacctgagcacccaggcgcagggtcacccccatggcgcccgcgaccctcaccaacagcagacctatcaacacgtcgccggtgatttcccccatcacctcgctcatcgcttgcggcggcaacatccgtatccaactgcagatcgccgacaggtagataaacatcaacggctcatcgctgagcacgagcaggccctgggcgatggcgtctttgcccagtttcagcagttcatccagttcggcctgggagacgtactgcagcaacttctggctgttgctctggaggtccgccagcagctcggacagttgtgtgaaattgtcccaaaggctgtaaagcgccttacccattccattaagaaacgccttctccagcagcctgcgttgatcaagcgggctggcgtctgtgtagtctttccactgggcttcgaaggtgtttttccactcctcgcgcaggcgtgcgtccaatgcatcaatcaccgattgataggatgcatacagtgccttgacgtggtccttggaaacgttgggatagaagctgacccggtatggctggtcgcgctcacactcgtcgatttcgagaatgccgctcgggccgatggttttgtggatcggctcgcccagtggcccgccgttggggtcgacacgctgcaacatcaccggcgtgttgccgatgggtacgaactgcgtgctttggaacaggtgcaccagggtcaacttgccgttggcctggcaagtcgcaacggtggtgcttgggtatagagaacgattgatcggcgcgaccagcgccacttcatccccgaccttgaagacttgctcgacatccagcgccgacaggctccaaaagctcgaagcccatgcgtcaaaggtattcaggcattcccggaaatcgcgaaagacgcgctcgatatcgaccgtcttcacatccattggggtcagggccagcctgccaatggccgggttcaagaaacagctccaacaaccagaaagtccatttgcaatccctcgcactgtgtagtcaggcgagggactttgcggaccttttcaggggaggggagtagagcttatccggcggttacgtgggacgtttcgacaacgctcgtcttctctcgccccaacaccaggctgcacagtgccggcaagaacaacagcgtcagcaccgtgcccaccaacaccccaccgatcagcacgtaggccagggacgaccagaacaccgacaatgtcagcggaataaacgccagcgccgccgccagcgcggtcaggatcaccggccgtgcacgccgcacggtggcctcgacgatcgcctcgcgaatggccatgccgtggtcctggttctgacggatctggtcggtgaagatcagcgtgttgcgcatcaggatcccgccaatcccgatcaagcccaggattgcattgaacccgaacggctggttgaacagcagcaaggtcggcaccgctccgatcaaacccagtggggcggtggcgaagaccatgaacatcacaccgaacgagcgcacctggaacatgatcaccgtgagcgtcagcaggatcatgatcgggaacagcgcggccagggcgacgttggccttggcgctttcttccaccgggccgccgatgtcgatctggtagccggccggcagcttggcgatcagcggttgcaggtctttgtacacggccatttccacgtccggcggttgcacgccgtcgatgatgtcggcgcgtacttcgacggtggtcgcgcggttgcggcgctttaggatcggttcttccatcaccgcctggaaatgcccgacctgggccagcggcacggaggtgccggcgctgttggtgagggtcatgttgttgaggttgccgaggtcttcgcgttggctgccctgggcgcgggcgaccacggacacagtgcggttgccttcgcgcacctcggtgatggggttgccactgagcaacgcgttgagctgggatttgacctcgttgggggtgaagcccagcagacgcaggcggtcttggtccagcaccagacgatacccgctggtgcgctcgccccaatcgaggaaggcatccttggtcagcttgttggcggcgacgaccttgcgcacgtcttcggagatgccacgcagcacatccacattcgggccagacacacggaacaccaccgggaacggcacgggcgggccgaacagcaactgcgtgacgcgcacccgtgccgccgggaactcaccggccgcaatccgctcgcgcatgcgcagtttcaatgcatcgcgggcatgggagtccggggtctgcacgatcagcttggcaaacgccgggtccggcagttcagggttcagcgacaggaaaaagcggggcgcaccgccgcccacataagtgtcgaccatcgtggtttgcggctcttgcagcagggctttttccagctgtgcggccaccgcttcagtgcttttgaaggcactccctggcggcatgtacacctcaagaatcagctcggaacggtcggagttgggaaagaactgcttcttcaccacgcccatgcccagtacgcacagtacaaacgcggccaccaccagcccggtcaccagccaacgcccgcgcacgcaggcttccaccagcgtgcgcagtttctggtagtagcgcccggcgtagatcgcgtcatgcccgccgggcaccggcttgatctgtggcaacagtttcacgcccaggtatggcgtgaacaccaccgctaccagccaggaggaaatcagtgcaaagccgacgatccagaagatattgccggcatattccccggcaccggagcgcgcaaagcccaccggcagaaagccgatgatcgtcaccagcgtaccggtgagcatcggcgccgccgtggagctccaggcaaaggtggcggcgtggatgcggtcgaaaccttcctccagtttcaccaccatcatctcgatggcgatgatcgcgtcatccaccaacaaccccagggaaataatcagcgcgcccagggtaatgcggtcgaattcacgcccggttagcagcatgatcacaaacaccaccgacaaggtcagcggcaccgcagcggccaccaccaggccgacacgaaagcccaaggccaacaggctgatgaccatcaccacggcgagggcaacgaagaacttgagcatgaactcgttgaccgccaggctgatgtttttcgcctggtcggagactttggcgaagttgaccccgagcggcaggtcggcctggattctggcttcctgggccttgaggctcttgtccagctccaggccgttccagtgtttctccatgatcacgccgagcatcagcgccgggtcgccctggtggcggatgcggtagctgggcgggtcttcatagccgcggctgacggtggccacatcggcgatgcgcagcacgcggccgttgacttccagcggcacgttttcgatcagtgacaggctgtcgaacgcgccgtcgatacggatgtaggcgcgggcgccggcggtctcgacgaagcccgacggcgccacggcgttttgcgcggccaacgccgaaaaaatctgctccggcttgatgcccagcgtcgccaggcgttcataagaaaactccacgaacacccgttgcgcctgttcgccgaggatattgaccttcttcacccccggcaggttgaggaaaccctggcgcaattcttcggccatctgcacctgttgccgatggggcaggtgctcggcctccagcgcgtacagcgcgaagtacacatcggaatattcatcgttgaagaacggcccgctcacgcccttgggcagtttggcggcttcatcgctgagttttttacgggtctggtagaacaggtcctggatttcactgggccgcgtggattccttgtaggtcatgcgcatcgacacgaaacccggctgggcgatggtctcgacgcggtcgtagtagtccagttcctgcaggcgcttttccaggcggtcggccacttgctcctgcatttcctgggcggtggcgccgggccaggcggcagtaatggtcatcaccttgacggtgaaagacgggtcttcggcgcgcccgagcttgccaaacgaaaacaccccggcggcgaggatcgcaatgatcaggaacaacgtgaccgcacggtgcttgaccgccagttcagagaggttgataccgcgcatgctcagttgtcctgtttgcggttgagggccaatgcctgggcgggcagcaggcgtacggcgtcaccctcgtgcagcaggtgtgcacccagggcgacgacgatttggccgggcgctacgccgctgtcgagcagcgcgtcttcctggccgaggctggcgactttcaccggggcgaagctgatcgtgtcatctgcaccgatcacccacacgccagtgccttgcccggcgtcctgcaaggcgccgatgggcacgcgggtttgcgcggcctggccgttgccttgcaggcgcacggtgatggtcgagccgagggcgaaacgctcgatggtgccatgcaacacgtagcgagcgcggtaggtacgggtagtcgggtcggcgctggcggacagttcgcgcagagtggcggtcaccgcctggtcgggggcgccgaaggggaaggccagggctttctgcgaagcttggtcgcgctggttttccggcaggttgacgatggcttcacgggctccgtcgtgggccaggcgcgcaacgatctgtccttcggcgaccacctggccgcggtccacccgcacgtcggtgatgatgccgtcgccatcggccttgagcaccgagtaagtgcggcggttttcgatctggctggcgtcggattgcgccgcggccagctcggcttcggccacccgcaggttggtcgccgactggtcgaagatctgccgcgacacggcgccggtgctggccaggcgctggtagcggttttcgtcgtcacggcgttggcgcagttgggcctgggcggcggtgacgcggtttttcgccgagcgcagggccagttcgaagtcgccgatgtccagtaccagcagggtgtcgcctcgggacacgtgctggccggggtcgaccttgcgttcgatgaccttgccgccgacgcggaagcccaggtcgctttcggtacgtgccgcgaccacgccggtataggcgctttgctgggtgccggccgcttcgactttggcggccaggaccgggcgaggttgaggcacttcggcggcggtgtcggccttgctgttgcagccattgaggacgatcaacagggccaggggcgtgagaagacgcagggggagaggttgcatggcgggctccggggtaaccattgggcaaaaaattatggacataattttttacgcatattatggtcgaaatataaattaatccagccccccggatgttccccatgacaaacgccccggccccatcgcgaagcttgctgtttttactggtggccctgacggcactgggtgaggtctcgacccaattgatcattcccggcctgggtgccatcgagcaggcgctggtcgcgccggcaggttcggcactgatggcgttgtcggcatttgtcgccgctttcggccttgggcaactgttgttcggcccgctgtcggaccgtattggtcggcgcccggtgctgattggcggcctggcgctttacgtgctggcgacgttgtcgatgctgctggtccacgacatccaccagttcattgccgcccgcgtgctgcaaggcctgggcgcctgcgccgcgctggtactggcgcgcacggtggtgcgggatgtgtggaaggccgaagccgggccggccctggcgttgaccatgatcggcatgctctacgccatcgtggtggcgccgatggtcggtggcctgctgatcaaactgttcggctggcacgcaccaatcctgctggcgctggcgattggcagcgtggtgctgttgctggcgttgctgttttttcgcgagagcaaccactcgctcgatcccaaggccggtcactggcgcaccctcggcgggcaatacctggacctgctcaagggccgccagtaccgggcgttcgccgtggcgctggcgtgcacctatggcgccatgtttgcggtgatcgccggttcgtcggcggtgttcatcaacctgctgggcttcagcagcctggaatacggcctcaattttggcctgattgtgtcgatgctgatcgtggggtccacctatacccgccgcaacatcatgcgcctggggccgcagcggattgtagcgatgggcgtgacgatggtggcggttggcggggtgtcggccgtggtgatttatgaactgttcggcctgtcggtgctcggcctggatattccgattgccctggtcaccctgggtggtggcctggtgttgccgggcgcggtcaccggcggggtaatgcccaatgcgcatcgcgcgggcctggcagcggggctgatggggtttgcgcagatgttcggtgcgacttgcagcggcatcctgctcagccagctgcgtgacggcagtgccgcgccgatgatcatcatccaggctggctttgcgctgacggcctacgtggcgtttcacctgctgcgccaacgtcaggtcaagggattgtcctatacgtaggacgaacagggctgcttttgccggctagtgctcaacggcgggcagccttatggtgtatgcactttggaggtacaccatgaaaaagcttatcggcatctacaccagcccccgcgcccattgggtcggcgacggctttccggtgcgcacgctgttttcctacgacgccatgggcaagcacatcagcccattcctgttgctggaccacgccggtccggccgatttcaccccgactgagcaacgtcgcggcgtcggccagcatcctcatcgcggctttgaaaccgtgaccatcgtctacgacggcgaagtcgaacaccgcgactccaccggtgccggtggcaccatcggccccggcgacgtgcaatggatgaccgccgccaaaggcatcctccacgaagagttccactccgcagccttcgcccgccgaggcggtgcgctggagatggtgcagctgtgggtcaacctgccggccaaggacaaaatggccgaagccggctaccagacccttgtcgatggcgacatcccggtattgcccctggccaacgacgccgggcggctgcgcctgattgccggtgagtttgccggcacccgaggcccggcccgcacctttacgccgattgatgtgtgggacctgcgcctcaaccctggcaagcccgtcaccctggacctgcacgaggggcgcaacaccgcgctggtgatcctgcgcggcacagtgctggtcaatggcgaggaagtcgcgcgccaggggcaattggcgttgttcgagcgggagggcagccagctcacgctcgagtccaatgacgacgccaaggtgctgctgctcagcggtgagccgattgacgagccgatcgtcgggcatgggccgtttgtgatgaacaccgagcaggagattcatcaggcattcgccgactttcagtcgggtcgtttcgggcagatgtaagcacacccgctataccctggcgcggcatttcatgcgatcttcacggcattcgccctggagtcgcctggatgccctcatttatcgctgatcacccgatgctgtgcgccctggcgctgatcttgatcgacatcgccgtgtggcgtcttatttcagccaacctcgccaactggaagctggcggcgcggttggtgatctttgcggtgttcagcgccgtgctgttcaacgacggcatgaaccccatgcaactggcgccctatgcggacaacaccgccttgcacctggccgccacggcattgcagatcggttggtggctgttcgcggcgcgcacgctgacggtgttgctcggcacgctcatgatgcagcgggtcgggcataccggccgcctgttgcaggacctgatgggggcggtgatcttcctgatcgcgatcattgccgccatggcctacgtgctcgacctgccggtcaagggcgtgctcgccacctctggcgctgtagcaatcattgtcggcctggcgctgcaaagtaccttgagcgatgtgttctccgggatcgtcctcaacaccaccaagccttatcaaatcgatgactggatctccatcgacggcaccgaaggccgggtgacggacatcgactggcgcgccacgcgcctgcaaacctcccagggcagcctggcggtgattcccaactccctggcggccaaggccaagatcatcaacttttcgcgtccggcggacatgttcggcctagcggtcagcctgcaggtcagcccgcatgcgcggccgcaaacggtgatcgaagcgctggagcgggcgatgcaagggtgtcgaccgctgctgggcaagccggcgccaagtgtggcgttcaagacgtcggccagcggtggcgtcgagtatgaaatcagcggattcgtgccggccatggccctcaagcgcgaagtgcgcaaccagctttacgacctggccttccggcatttgcaggcggcgggcgtcggcttgctgtcggccactgaaaacagcgcgccaccggcgatgtccgcggcgcgcgcgttactggagcggtcgtcgattttttccaccctgcgccaggaagagaaagacaccttcagccagaacatgaccctgcacacctatcgcgccggcgagatgatcctgccggccggagaggtcagcgatcatttgttcatcgttgagtcgggtgtggtctcggtgatgttgaccaagggcgggcacaaattcgaagccgggcgcatggggccgggggaggtgatcggcgaggccgggatcctgtcggatgaggccacgctggcggatttctcggccaagacgttctgcaccctgtaccgcatcgagaaggaatacttgaagccgtgcctggatgcgcgccacgacatcggcgaagcgatgaaggccttgctggatttccgtgtgcacgccgcgcaggccttgacccaggaggcaccggtggtgccggtgaagaagggtttcctgcagtggctgcgccagcgcggtctgtgaactccagatcgtgcaggcacaatccgccaggcgtgttaccagccgcgcaggcgctcccacacctgtagttcgccggtctcagacaccgcggtgtaacagccgaactgcgcccctgtcgcacacgcatggttgggcagaatgcgtagacgtttgcccagtgggaattgcgcgaccacatccacgtcgcgcccctggaactgcgccacgccatgttcctgattggcgctgcccagcagcaatccatcgatgggcttgccgtgttcatcgcagacctggccataaccaaaatcacgcttctgcgcctgagtaccgcgatcccggctcatggccatccagcccgcgtcggtgatgatccagcccttttccggctgatggccgatcaccgtcgtcagcacgctcaaggccagttcatcggtgcggcatacgccgatgttgtgcatcaccagatcgaaaaacgcatacacgccagcgcgcaactcggtgacgccctccaggctcactgccgacagcgcggtgggggtggagccgacactcacctgtgcgcacggcatcccggcagcgcgaatatgctcggccgcttccacgcaccgtgcgcgttccagttcggcgatggcccgcagggcttcgggcgtgtccagcccgtagctttcgccggcatgggtcagcacgccgaccaggctgtcgccgagcagccgggcaatctccagcaagcgcgggtcctgcggcttgacaccggagcggtggccgtcgcaatcgatctcgatcatcaccgcaaaggtttcgccatgctcgcggccgaagtcgatgatggcctgggcaccggcaaggctgtcggtgatcagcgtcaacgcgcaaccccggcgacgcaaggccagggcctgaggcaatttgtgcggggccatggccacggcgtagaggatgtcgtggatgcccaggtcgaagaaatactcggcttccttcagcgttgaaacggtgatgccgcgggcgcctgctgcgatttgcgcggcgaccacttcagcgcacttatgggttttgacatgggggcgcaggtgcacgccgagggcattggcacgctgctgcatgcgctggatattgcgctgcattttcagcgtgtcgatcaatgcggcgggggtatccatggtgcgggctccacaatgaggggcagggggtaaattgacgccctgtccaggactggatatgttgtcttgcatgaaaaacacctctcccaacgatactcacttgatcagccagctcgaacagatcgccgagggcttgagcaagaccttcagccccttctgcgaagtggtgctgcacgacttgcgcgacccccggcactcgatcctggccatccacaacaacctgtccgggcgtgcgcccggcgacccgaccaccgagctgggcctggcgcggattgccgaccccgactacccgcaagtcatcgccaactaccagaaccagttcagcgacggccgccaggtcaagagcacctccatcggcatcaagggcgccggcggcgagtacgtcgcggccttgtgcatgaacgtcgacctctcgttgttccgtggcttgcaaggcatgctcgaacaattcggctcggtcagtggcgacaagctcatcgagtccctggacccttccggcgccgacgtgatccgtgcgcgtatcgaccagttcgccgcccgcctggccaccaccccgcgtgcgctgaagacagccgaccggcgtgtgctgatgcaggaactcaaggactcgggctgcctggacatccgccgggccatggaaacggtggcgtcccatctgggcgtgtcgcgtgcggcggtctacacctacgccaagtagcgcgccacggcctcgatctcgatcaggtaaccgtggtgcaactccggcaccggcaccaccgcgcgggcagggcggtgctcgcccagcgcggcggcatagaggccatcgaaggccggccaatgctcgacgccggctacgtacacggtgaccttcaccaggtcctgcgcggttccgccggcggcgttgaggatggccaataaattatccagggcaatttgcgcctgttcggcaaacggcgccatcaggttatgccgcccatccgggctcaccggcaattggccggagatgtacagcgtgtcaccgtggcggatggcttgtgagtaatggccggcaggctgggccgcatgggcggtctggatgatcttcatgaggcctcgcacaacagggcggcgtacttctcgatatcgacgttgccaccggtgacgataatgcccacgcgctggcccttgaagcgttcaccctgtttgagcaacgcggccaaccccaggcagccggtgggctcgaccaccattttcatgcgttgcataaagaacttcatggcgccgaccaactcggcatccgacacggtgaggatgtcgttgacctggtcgcggatgatcgggaaggtgcagttgcccaggtgctgggtctgggcaccgtcggcaatggtcgccggcgtgtcgatgtgcacgatgctgccgctgcggaacgagcgctggccgtcattgccggcttcgggttccacaccatacaactggcaatccggcgccagggcacgggtcgacaacgccgtgcccgagagcatgccgccgccacccaggccaacgaacaatccatccagcgggccggtgaattccagcagttcgttggcggcggtgccttgcccggcaaggatatgcgggtggtcgtagggcgggatcagcgtcaggccctgctcggtggccaggtcgcggccaatctgttcgcggtcctcggtgaagcggtcatacagcaccacactggcgccgtagccacgggtcgccgcgaccttggccgccggcgcatcgctgggcatcacgatggttgccggcatacccaataactgcgccgccagggcaatgccctgggcgtggttgccagacgagaacgccaccaccccggccttgcgctgctgtgcatcgaactgcgacagcgcattgaacgcaccccggaacttgaaggaaccggtgcgttgcaggttctcgcacttgatgaacacctgggcgccggtcagtgcgtcgagggtgcgtgaggtgagcactggggtgtgatgggcgacaccctccaggcgctgggcggcggaaatgacgtcgaggtaagtcggcaatggcatagggcggacctcattggctggtatggataaaatatctatatcaagacaaatagtaaaggttggtttgtgcatgttagcgttttgcacttctctgaccgctggaggattcaacattgatccgcctcaccgactacatcgccgacctctcccaatctccgcttgcaccgtgggctgacctcgcgccctgggcgctggccgctcaggcgcctgctgttgtgcgtcagttgctggctgaactgccgggcgacgattacataattgaggatgaaatcgcggtccaccgcactgccaccgtagaagcgggcgccttgctcaagccgcccctgatcatcggcgcccattgcttcatcgccagcggctcactgctgcgcggaggctgctggctggatgcacattgcatcatcggcccgggcgccgagttgaagacctccttcatgttcagcggcagcaagctggcgcacttcaatttcgtcggtgattcggtgctggggcacggcatcaacctggaggcggggagcatcgtcgccaactaccgtaacgagcgtgatgacaaggaggtgcgagtgcgggtcgacggtaccttgcagcgcaccggttgcgacaagtttggcgcgctgctaggcgaccagtgccgtatcggcgccaatgcggtgttggcgccgggggcggtgctcaagcctgccagcgtggtgggacgcgggcaggtgtttgatgctgaagcctccctataaacaccgcgttgaaaagatcatggtcagtcggcacgatattaaatagaatgaatctcatttgagactcactcgcgccgcgcaggtcgcttgccatgaatgatgctgttgttccgacccacgcctccgaactgaccttgtcgagcctgtaccgcgaccatcggagctggctggaaagctggctgcgccggcgcctgggcaacgcctgggatgctgccgacctgagccaggatacgttcctgcgcgtactcgccagcgcccagccgattgcgcagatgcaggagccgcgtgcttatctggtgaccgtcggcaaacgcctgctggtgaatttccatcagcggcgcagtcttgagcaggcctacttgaatgccctggcgagcctgccgcaagcctgcgtgccatcgcccgagcagcgctggctggtcctggagaccctgcaagccctggacgagttgctcgatggcttgccggtgctggtccgccgcgcctttctgtggagccagttggaaggcctgggctatcgcgacatcgccgaacggcttgaggtgtctgaacgcacggttaaacgctacatggcccaggcctacgaacactgtttgctggtggacctgtgagccgtgacgtcgctcgcgccgctgcccagtggttggcgctgctcgaatccggcgcggccaccgagcgtgaccacgccgcgttgcagcactggcgagacagccacccccagcacgagcagacctggcaaaaagcccagaccctgcgccagcgtttcagcgacttgccccaggccctggcgatggccagtctcgaccgtccgcaaccggggcggcgcgctgtgctcaagcgtgcattgggtatcgcagccttggtgccgacggcctggctggtcagccgccaattgcccctcgaggcgtggcgcgccgacctgcacaccgccaccggcgagcgcaagcgcatgtccttggccgatggcggcagcttgcagctcaacacggcgacagcggtggacatggaccttgcacagcggcgcatcacactcgtagacggtgagttggcgctgaatgtacccggggcggcggcgatgacggtgcagacccgctatggcgaattgcgggtcagccaggccgaggtgtgtgtccggcagctggccaagggttgtctggtgtcggtgctcaagggcgcggtccaggtacgcgacctgaacgggcaaatggcgacgttgccgggtggtcagcaagcctcgctgcaagccggcgggctcggcgcctgggcaccgttcgatgtgttgcaattgggttggcgcgaccgcgtgctgaccgcacagaaccaggcgctgggcgacttcttgcgggaattggaacgttatcgtcccggtgtgttgcgctgggatccgagcctggaaacgttgcgagtgaccggcagttttcgcctggacgacaccgacctcatcctcaacctgctggcccagaccctggggctggaactgcacgcacgcacacgctattgggtcaccctgacaccgcgcaaatcgctcacctgatgcgggtgtggtaattcttatatatccatatagaataaataaagagttatatattccttttgttgttgttgtcgatggcgcattttgagggcctgcgcattcgtgcggattgacccaacagccaaaaggaaagccgacatgaccattaaagcgatcaacgtgcgcaaccagttcaagggcgtgatcaaggaaattctgctgggggaagtggtgtcggaaatcgacgtgcagaccgcgtccggcattgtgacttcggtgatcaccacccgctcggtgcgtgacctcgaattgaaagtgggcagtgaagtgattgcctttgtgaagtccaccgaagtgtccatcgccaagctgtaaatgaccgcccccgcactcaggcgggggctgtcatgactcaagcgatcttcggtccactgccacccggtggatgcggctgcggtctctccggcggcgcatccgtcggcaggctcttgggtttcgcgttcgggtctttgtagcccttgtgcaagccgccgtccaggcgattgctcgacgagccacctttctgcggggtctggtcgaagtgttcccactccgattgctggaagcggaagatgctgtcgtcggtcggcgcgtcacggccaccgtaatggtggatttcatagtgggcgtattcgaccttgtcggcccagttgtcctgcaacagaccgtcgcccgccaagtcgcgataccagtcgttttccttctcggtggccttctgctttttgttgtggtcgacaaagtagccgatgatcccgccgaccaccgccagcaccacacccaccaggaacaacggcccggtcaacgccgccgccgtgcccgcgccaaacagcgccgcagcccccagtaccccggccgatgcaccgaacgcaccgccggccacttgcaggccgccggccgcctgggccaaggggtctttgtccttcacgccgctcttgatcgccagtgcgcccagtacgatgtcggcaaaaccgccggcaatgtccgtggccgggcccagcaccttgatcacggaaccggcgatctttgccgatttggacgcgccgagcttggccgcgcccgcagcggccaggccgtcatctaggtgggtggccaggccttcggtggcttcggtgacggccttgtcgccctcgccgaacagcttggagatgccgtcgtactggctgtccggcaccgcatcgagggccgtggcgatcttggctttgacatccgagggcagttcgctgacgcggaattcgaagttcggctcctgcatgccggtcttgccccagatctccggcagggtcttgtccagcccgaggaaatccaccaggccgcctttgcccaggctctcgccgatcttgtcgcccaggcgtacaaagtggctggagccgccggcaaaactcaggaagtccttggcgatggtcatgcgttgcgctggggtttcgccgagcttgccgcctttgcccaccagttggtaaatcccggaaaacaggctcacaccggcgcccagtgaaccgaggatgcctttgctgttgagggtgttgaacacctcgccgagcatgccgcgatcggccaccgggatgtagggtttgctcagggcggttttcaggtcagcttcgctgatcacgccgtttttctgatacacggcgcccagctcttccagggccttggtgacggcggcagatttttccttgccttgcaggccttcgttgaggaatttctccagggtttcctgggtgcggcgcggcaagtccagcacgttgcccttgagcacgcctttgagcaggccgaacaggtccttggtggccagctccttgttctcgtcggagatcttgctcgggtccgacagaatggcattcaggtcggtggtcaagccgtccgcctggatgttctgcgcggctttgctggcggccgccgggtcgaacagcgacagcgacgtcagggtatcgctgaggtctttctgcgcctcgtaggtcttgccctggctttgcaggtccttgaggtacaacacgtagtccgggttggaggtgaggtccagcagcttctgcttgatctcgtccttgttcggcagcttgttgatggcgtcgtccatcttcgacttgtagtcagcctggatggtagggtcgttgaacagttcaccgatctgtttttgcacggccttgccgtcgacgatgtcgtgcatatcggccgaggtcagctgggtctgcttgtcatcgaactcgcgccaggtggtgttgaacgggcgtttggactcctcgtagccggtgatgccgtggccgttctggtaggcggcttgcgcttcgagggcgcggaccagcttggcgcggggatcgtccttggcaatcgagccgttcttcacgccttcgcggtaggtgtcgatcagttgcgtggtggccagttcgctgacgctgagggtcggcgacttgtcgtccttttcatcggcgtgcacgccagtgtccatgttcagcacgtccagctcaccggacttgggcaggttgtgcttggtgcgggtatcgtccaccgaactggcactggaggcttcccacttggccgccacatcatcgtagagctgcgggctgagttccttggagacgatcaccttgccttcgctggtttcgtagcggatcaggccgtcgcccagttcatccggggagccgaaggtgatgtcggtgtttttcaggaagtcattcggcccggccagcttgtagccttcgccttcgctggtgtggatcttggcccaggtgtcattggcggtggcgacgctcttgaacagctcggggctgacgtcggaggacaccaccaccttggtgccgtcatgcagctcgtaggtgaggatgtggtctttctggtcgttgttccaattgaagttcttgtagtcgttcaggcccggcaccggggtgttggcatcggccagtatcgcgccgttattcagctcgccttccaccacggctttcttgccggggtcggtgtagaccgcgtgcaggccggccaggtagtcgaacagcttggggttgtcgtcgcgggccaccaccattttctggccgttgctttcaaagcggatcaggcccgggccgacttcatcctcagggcccaccgtggtgccggcgtagggtggccacacttcgttgtcgctggcgcgcttgtaaccggcgttttcactgttggacaggccggtgaagctggcataggcgtccttggctttctggaaggcttcggggttgtcgcgctggctgatgacgaccttggtgccgtcctgggtctcgtagcggatcacacccgggccggtttcatccggtgcgccaagggatttgtaatcggcgagtttgcccggcgcagtgccatcggtaccgaggctctggtagccggcattctggctggcgaccacgccggagagggacttgaagtcctggctgacctgcttgaacagctcggggctgtcctgttcgctgacgatgactttcttgccgtcctgggtttcataacggatcagcccagggccgacttcatcgggcgggccgatggccttgtagtcggccaatgccttgggcggcgtggcatccttggcggcgagttcgtagccgtcttttttacttgcatccagccccgatggtggcttgtcctgggcctcaacctttttgttgttggcgctttgcttgagcaacgcatggaactgcgcgccggacttgggcggcatgcggggaagggctttggggtcggacgagcgatcgaggggctgggtcgtcatgccatgaaactcctgctgttaccggtggggcgtatcggcaaaaacagtaacagcaggggttcggcacgcgttgcgaaaagttgtgaattgagtctgcggcagctttcaattcaaagtacgccataagttcgggagcggataagtctgataggcgcccaggatgcaggattggtacgttggcctgagccaggatactcaacgacagggacgccatgccataaatcactttccagagactacccgtgcattcagcgtcctccaccgccttgtcgatgtttcaatctccgaatctgcagaacacagacgctccctctgcggtacaacaaagaacacccgagcaaaatcgcactcgccgggatacctcaagcgcatcccggcaggatcgtgacgccccctccaacggtattccggataccgacgttccagagttatttcaacagaaagtggccacggctcggcatgagttcacccgcgacgactacttgcgcggctataacgcgccctcgtcagtagcattgcctggttatcactcatcaatgcgcgacgtggcgctcatgaggcttgcggtggataaccggttaagcccggaacaaataggtgcattacagcgcctggttgagcagcgtgtgatcaaccgttctcaacaatcggtgagccagttcacaaagataatctctacccatggcgtaaaggtgactcccgcaccgcaaagctactatctgtctatggtgaaccaggcatccggcggcgaatgcgcagggttttcacatttactctccatagcggcggcgcagggtaaacaccagacttttctgagtaatgtctattacgccatcgcaaatccgtatgcgccggaatcagaggagtttttccggaaagtcttcgaggttcaggcccgtgtaaaagatcgtgatattgcacatgaccctgcaaccgtgaaggccgccagctataccgagattgccccgcagttgttgaactcgccgtccacaaaaacgctcttgatcagcagtgaagggcatcgcctgaccgcaggcgtcatcgttgatccacaaggggggcgaacgtattacttcagtgatcccaatacgggttttactgaggctgtttcggcggaactgtttgaaggtgtactgaagaagatatataccgatcccgtcctgaaacagtttgtgcaaccgttgaaggcgtttccgggtgaacagaaataccttatcagcgtattcaatccagatcttattcccgagatatccggcgcatccaacgacatcaagttcatgtacaaccgtcctctgaatgggctggacactgtcacagtgctcaatacttcacggctgccgacggttgaggattcccgcctcaaggcgtattcccccgaacacaccgccatcaaagattatgagcgggtggtgcaagggctggacaacatgcaggccagcagaggcatgccgcagtatcaccaggcaaagaccgttctggaggccgtcaatctattcatcagcagccaccctgcttccgcgctcgtaccggctatggagacactcaggaaacgtttgacaagtgcgatcaatgaggcaattgcgcctgttgagtatccctatgtcttcgagcgtatggagcaagatcgtgtggcgttggccgagggtaaagtcggcttgtcgaaacatttccaaagtgaagtcattcagggcaagactgttgatataaagagtaatggtgatggtgaccccgatagggcagtacgggtaagagatgctgtagacgacgctctgaagaagctcgcgcagagcgatcctgcagcggcgcaggcgatcgggggaaaagtcagggtgattattgccaaccctggcgatcaaccagaaacgcggctgcactttaatagtccgccgacgttgatcattggtgatgatttttttgcgtcaccccctgcaactgacgctacagtcgccgatcgaatcggccatcaagctcaggcggacggaagaaaggtccaagcgtccaggcaggctgcgctgattgtgggcaagctggggatgttgggctattacaaagctgactcccaagggttccttgaggtggttaacaacaaggagccctttcgcgacggaggcagtaaagtcagcgcacgcgctgccagaagcccaggtgatttcatggaggagaccttcaccgcacgtgtatacgatggaaaggtcggtagtgaaaccgatgctgcgctcaataggcttttcgctccagcagctaacgctccaccacccagcaccccgcagccaccgagcacgccgactctgccggtcaacacgggagcattaccgaccacagcgggagggacgattgacgaggctgaagtaaaacgcctgcaagcacttgatgaaacccgcgcgcccttgcaaataggggaagcgagcgtcagccgagtcgaactttataaaatgggcgtgcacgtcaagggtaagccagttgaaaacacagtgcccatggatgccaaggggcgtatcagtggcgacgtggaaatagacttcgaccgtcttgtggcttttttgaagtcgacatcgcctgaagttggggcgcgcgtgacatccatcgccagtgaaattgctgtcaagcgcagccctgtcacggcccccttggtgacccgcagcgacggcagtcccgtccctgaacacttccagaagcaactacgtgacacatcacgacaggctgctgagatacgtgacgtgcagagcagcggcaaaccgctgcccgcaaattttttctccccggcagaaacatcgggaaagccgggggcgactaaagccgccggcctcggcttccaggcgttcagcacattccaggggctgtgcagttccatagagagttttcaacgtggcgatacgacggcgggggccatcgcagcgggcgctgtagcgtctgactacgtcgggatgggtgtagaggctggcctcaacaaaatggcgcagtcggcagtcaaaaccgtgacgccgacgataatgggcttcaagtcctcgacgataggcaagatgattggaaaggttgcgggtggggccagcgccgctatcagtgttccttttgatatcaaaaatgccgtcgattcgttcaataaagcggctggcagtaccggtaaggaagcgcaggatcactatgtcaacggtgcattcgccgtcaccaatgcggtgacttcgataggtttgagcgccgcatttctggccggcgcgagtactgccgggccggtgggacttgcagtggcggcaatattgatgaccgcacaagcgatttactcggccgtgcgtactgtggaggacatcaatgaatacacgccgctgtccggttcgaaaaagttcgaagtcggactgaaaacattcctggggtttgagcctgggtttgatgtcatgaagccttatctggaagcgaaatatgccaaggattacgacacgcagaagaggacgtatcatcaggccttcctggacggcccgggcaaagaccatttcgaacgtgttgtatttggcgctggggatgtagtcgtcacgcaggtgccgggaaaggttgaactgacaggccagcactggtgggctccgatcacctatttgctgaacctgatcaaagtggatgggaaagtcccatccgttaacatcaggggtgggaatgatcgtatcaatgcgcctgccgactcctggaacggcatgtcagtcaagcctgtggagggtgcacaggggacaggaaaggccacgctctgggacctgggcgatggcgatgacgaggtggcgggagtattcagcaaacccaactacttcttgttggggggagggaaaaaactgatcagtgggggagcggctgatgattcggttatcttcagcgctgatgcacgtcagaccctgcagcaggcagagcaggtctgggatactcagaacaataaagggttcagtaaaaaagccactgagctctggggcggtgagggccgtaacacactggtattttccggcagcttgagcaccacttacaccgaaggcaaagacactaaaaccgccagctattcagggcatgtcattgacttcaagaccgggttgatttcagtcagtacgccagactcgaaaacagaaggtacttctcccattgcctattttcatgagttttcaaatgccgccacagttgaaaatggcgaaagttatatcgtgggtgatgaccagagcaatctgtttaccttgaacggcaagcatgatgtggttttgaccggcaagggctccaatgttgtcgtgatcaatggcggcgctaacattgtcggagagggcggccccaatacctacatcgtcaacaaaagcgataaggaggtcaccatcaaggacccgaacgacagtgtgatcaagttggactacagcgcggcacaggtgtcgggatggagggtttcagcctcgggggacttgactgtaaaccttaagggggatgagcctggaagcgaacgtcaactggtagtccagaatgctttctccagcgattcaacgagtgacaaggcacggcccgcatttatcaccaatgacggtgtgatgatggcaatcaacgcgccacgccagcctggttcaggcacacgtgttgtgcaggtcagcagtgtcaaagtcgaaggtcccatgccccaagcctgagtccccgcgcagtagcaacagcatggggtgactggcaccggatacagtgccagtcaatctcagcgtttttgcaggctgcgctccatacgctgcaagccttcctccagcatcgaccgtgggcagccgaagttcaggcgcacgaattgctggctgtcatcaccgaattcgatgccggcgctcaaaccgaccttggcctgttccaggaagaactgctgcgggtcatccaggcccagggcactgcaatccagccaggccaggtaggtgccttgcggcgcgtgcatgaccacaccgggcaggcgggtctgcacggcgttgagcaggtagtcgcggttggcttgcaggtactgcaccaaggcgtcgagccagtcggcgcattcgctgtaggcggcgcgggtggcttccaggcccagggggctgacgctgtcgaccatgccacaacgggcgtggttgaagcgctcacgaatctcggcgttctgcaccacggcaaagcaggtcttcaggccggcgacgttataggccttgctcgccgacatcagggtgatggtgcgctgggcgatctcggggctgaggctggcggtggggatgtggcggcgaccgtcgaagcacagctcggcgtggatttcgtcggagatgatcaacgcgccgtgttccaggcaggcattggccacggccagcagttcttcacgggggaagactttgcccatggggttgtgcgggttgctcaacaacagcgcgccggcgccggtgagcgcctggcgcatcgctggcagtggcgtgaggtattcgccgttgaccagctcgaacggcacttcgatgcgcggcaggttccaatgccctggtgccaggcggatcggccggtagttgggggtttgcagcaccaccggttgccccggttggacaaacgcatgcagcgccatattgaaacccggctccacgcccggcaaaaacagcagctcatccggctgcacgcgccaggcgtacttggcccacaggtcggcgatgattgcctcgcgcacatccggaccggcgacgctgtagcccagcacctgctgatcgaggcgtgcgtgcagggccttgagcacggcgggcggcgcggcgatgtccatgtcggcgatccacatcggcagaacgtcttgcgggtagcggttccacttggtgctgccggtgccgaggcgggagtgaatcgtgtcgaaatcaaagctcatggggggctcgtatcagggcgtcaggcgcagggatggcgctgattctagcgccataatttttataggccagagctgattgcgagcgacagttgccgatgcgcctgttccaacgcgcgattgaccgcttcttcaccgcgcaccatggccggcaggtacacgaaatccactgactcaatgcccacggtcgccaggatggcggtcatgtacggcgtgaggaagtccggctcatgccccttgcgggcgttaccggaactgaccagcacaaaggtgcgccggtcttccagcaagccgaccttggcgaattgctcattcaccgtgaagctgcgctggatgcgtaccacatggtcgatccaggccttgagtgccgccggcacggtgaaattgtgcaccggggtgcacaggatcagcaggtcgcaggcttccagttcaacgatcaattgttccgagagtgccgtggcactgccgctcaggccgccgggtgtggtgagtgcgttggcatattcacgggtcaacggcggcagcgcctggccgccgtagtcacgttcggtcaccgcggcgtccggcaccaggtcgcgcagcagggcacgggccagtttgaaggtctgcgcggctttgccgtgggggctgaaaccaaggagcagggcacgggtcattggctgaggtcctgggaaaagtgcatgcctttgggcagcaggccctggcggaaatagaagcgctgggccagggccatgtgcatgccggtgtccagtaccagccagcgatagccacgggcgcgggtttcttcacgcacgcggtcgagcagttgttcaccgaggcggcgccgctgcaacgtggcgtctactaccaggtcatcgacatagataaagcggccatacagggtgttctcggtcagccggtagccggccaggccgatcacctggccgttctcccgtgcggcaagcaggcggtagccgttttgccgttggcgctggacttgctcggcgaatgccgtggcgtcgctgaggtgcgggcgcagctgctgcatcaccgcaaagctggcgatgagatcagtcgcggtttccacgtgggcgaattcgacgtgttcattcatggctgtggttctccaagtgggccttgatcgccgccggtactttgcgaaagctgatggcgacacggttaagggcgttcatcaagctgatggccagggtcaggtcggcgacttccttgtcgctgaacactgccgcgacctgtgcgtagtccgcatccggcacctgggtttgcgcgaccggcgtgaccacctcggcccaggccagcgcggcctgttcacgcggggtgtacagcggcagcccctcgcgccaggcggccagcaacatgattttttccaggctcacgcccagcttgagcaggtcgcgggagtggctgtccaggcaataggcgcagccgttgagttgcgagacccgcaggtaaaccaggtcgatcagttctttttccaggccgcagccgtggatatagctgtgcaccgagcccagggctttataaccggcgggggcggccagggcgtagtcgagacggtgtttcatgggcgatccttattgcggtgaagagatgcgccattttcgtggctggccgggtggcctgacaggggcatgattggacaagtgggttgggacatgatcagacttcggcctgtcttcccgccgagccacttgcgatgtcgtcactgcccaaataccaggaaatctaccggcgttttcgccaggccatcgaccagggccagttgcgccccggcgaacgcgtgccctcggtgcgggcgctggcccaggaactcaaggtggcgcggggcaccgtggaggcggcgtatcaactgttggtcagcgaagggttcttcgaagcgcgtgggcaagcggggacggtgattgccgaggcgttgccgcaggtgtcggtgaaacccatgccggttgcgctgccggcgacttcaggccttcggccgttgcaaatgggcctgcccgccctggatgcgttcccccgcaaattgtgggcacgcctggtcacccagcaagtgcgccgcaccgatgcggacagcctggcgatgggcgatgtgcgcggcacccaggcactgcgcgtggcgattgccaactacctggcgttgtatcgcggtgtggaatgcacgccgcagcaggtgtttgtgtgtgccgggtatgcgggcggcctcaccctggtctgcgaagcgctatcgatggcggggcagcgctgctggtttgaagaccccgggtacttgcatgcgcggcagttgttgaggcatcgcggtgtggaactggtgccggtgacggtggatcgcgatgggctggatgtggcgcagggcattgcacgggggcgtggggcgcgactggcgattgtcaccccggcgcaccagagccccttgggtgtggcgctgagcccggcgcggcggcaggccttgctggaatgggcgcgggagcagggcagttgggtggtggaggatgactatgacagtgaattccgctatcgcggccagccgttggcggcgctcaagagtcaggatgcggatgaccgggtgatctatgccgcaagcttcagcaagatgctgtttccggggttgcggttggggtatctggtggtgcccgtgtcactggtgtcgacctttgggcgtgcggccgaggcgttgcagcagcgtggggcgcagttgttgcaattgacggcggcggattttctggagcaggggcatttcacccggcatttgaagaagatgcgccagttgtatacgcagcgcagggggtatctggtggaggcgctgcgcgtgcattgcgcggggtatctgcgggtggatgagcaggcgggggggatcaatttgctggcgcggttggtggtggatgtgccggaccttgtcgtggctgaggctgccggtggggcggggttggcggttcaggcgttgtcttcctggacgcttgaggctgggcgggggcagggggtgttgatgggctttaccaatgtggcttcggcgtctgacgcggttgtggttgccatggttttgcgtgatgtgattggggggtgtgtatccgttatttagttcacggctactatttggttccgcccttacggccagctctttcaaggtctttaggtagaacaggcgataagtaccctgtggtgagcgggcttgtcccgcgttgggctgcgaagcagccctgaaactcgcgtctgaagagtgcctgactcaccgcattgcttcttccagggtcgcttcgcaacccaacgcggggcaaacccctctcgccacaggagcagtgttcgtctttgcgctggccggtcagtgcttgaccggggtcggcagggtcacgaggttgacgtagccatcccagaattgcttctggtccacgccgaacaccaccttggccttttgcgtgcccaccggggcacctttggcgtagcccagtgcgcggccgtagtcggcgccgaaggtggcgtccacatccacccacaggtcgcgggattcggtgacgattgcggggttgaccaggtacagcgccggcaggctgtcccaggtgaagctgtggtagctcgggtccttgtcgaacagcgggccgaactcatgcttgtacaggtcggcaatcgcgcctttgcgagcgatcacgcgctggtacaccgccttgtcgaaggtgactttctcgcacacatcgttggggaaaatcacgtgctcgatgggcgagcgcaacacgatctttgccgcctccgggtcgaaccaccagttgaactccgctgccggcgtggtgttgcccggaatctccagggcaccgcccatgtacacgatgcgcttgatcagcggcacgatgtccggtgccgagcgaatcgccagggcgacgttggtcagcgggccgacggcgaggatcgtcacctggtgcgggttggcgcgcacgctgtcgacgatgaactgcgcggcggtttccttgcgcagttgggtgtgggtggccaggccatccggtggtgcgaccaactgcgaaggagacgtcgggcgagggtgcttgaacgcccccggccagccggtaccgaacagcgtcttttccgcctcgtaggtggcgtagtcatgcagcaacgggtaggcggcgccggagtagacgcccacctctttctccacgcccatgcgttctacggccttgagggcgtcgacctgttcctggtcgacccaggcgttgccgctgaccagggtcatgcccagcagctcgatgcgtttctgcgcatgcagctgggcgagcatgatgaaggcctggccgtcatcgttgagcacattgaagtcggtgtcgaagatgactttttccgccgcctgggcggtgccggcacacaggccgaccgcgacaagcaacgcacagcgtttcaagaagccttgcatggtgattcatccgaaaaaatgtggttatcagcggttgaccagtttcgccggcaaggcgatgaccaggaagctgctgagaatcaggcaaccggcgaaaaaccacaaggcaccggcgctgctgcctgtgacgtcgatcgcaacgcccatcagcgagttgctcaccaggccggcaatattcgccaccgaacaggccagggcaaagccggtggccgccgcggtgcctttgaggaaggtcgccggcaggctgaaaaataccggcaccgcgccgatgatcgccgccgaggcaatcgcgaacagcgccacggtggccgccacgctgtgggtgaagaaggtgctggtggccatcgccgccgcgccgatgaaaaacggcacgatgatgtgccagcggcgctcgcggtgtttgtcggagctggcgccgatcaacagcatgccgagcagggcggcgacgctcggcaaggctgtgagcacgccgatatgaaaggtgtcggtgaccccggcgttgcggatgaaggtcggcatccagaaacccatggcgtaggcgctgagcaggatcgagaagtcgataccgccgagcatccacaccttgaggttgaagaacccgtcgcggaagctgtgcttgctggcggcgccatcggcgtcgtccttgcgcagctcggtttccagcagggtcttttcctcgtccgacagccatttggcttgctggtaggtgttgggcagcgcccagaaagtcagcacgccaagtaacacgctgggcaccgcttcgatcaggaacagccactgccagccgcgcaggccgcccatatggtcgaagtggcccatgatccagccggacagcgggccgccgatcacgctggacagcggcaggccgatcatgaacaacgcaatgatgcgcccgcgccggtgggtggggaaccaggtggtcaggtagtacagcacgcccggcagaaagcccgcttcggccgcgccgagcagaaagcgcaggatgtagaactgggtggtggaggtgaccagcatggtgcaggccgagagcaggccccaggtgatcatgatgcgcgcgatccagatcttcgcgccgacccgttcctgcaccaggttgctcggtacttcaaagaggatgtagccgacaaagaacaggccggcaccgaggccgaacgcggtttcgctgaactgcaactggtcgagcatttgcagcttggcgaaaccgatattgatccggtccaggtaggcggccagataacagaagcacaggaacggtatcagcttccaggtgatcttgtggtaaagcgtgttgacgggatcggcgaccgtggtcgccggcgctgcattcgcaatgggcatcgggtgtctcctggcggtgacttatggtttttttatacagccggcagttggtgtagggtcgcggaccgcgctcttatggcgcttttatggctaaaaccttattgctccctgaatttgcgcatcgcctcctgcttgctcaccacgtcgccatacttgctgtcgatatcgaacaggttggcttcatggggggccgggtgtcggtcgccgacgcattcgcgcacgacgatggtgcgaaacccgtgttgcacggcatccaccgccgtggcgcggatgcagccgctggtggaacagccagccagtaccacggtgtcgatgccttgtgcatgcagcatcggcgccaggctgctgccaaaaaacgcactggcgtactgcttggtgatcaccacttcatcggcctggggcagcacctcggcgcagaacgcggccagtgggttgccttcgaccatgtctttcatcaccggggccttcttgacccagattccgccatcgacgaaatggccgggatggtagcggatattggtgtgcaccaccgcaatcccgtgctggcgcgcgctggccagcagctccacgctttcagccacggccgtgaccacacccggtgcgaacagcggcgcgccgtcggtggtgtagccctgcatgaagtcgatcatcagcagcgcggcctttttgccaaagccgatgcggttgccccatacgccctggtagttggcgtcggcggattgttcgctcatcttctcaactcctcattcatgtttgctgtggcgagcgggcttgttgtggtgagcgggcttgccccgcgttggagtgcgtagcgctcccgctttttttggggccgctgcgcagcccaacgcggggcaagcccgctcaccacagaagcccgctcgccaccaccacagaagtgctttgcactccaattagtaggcaccggagagcagggcacccgcgccaggcacgatgggctccaggtccagggccttgagcatggcgtaggtggtagcgatagcggcggtgagcactggcttgccggtttgtgcctcgaccttggccaccaccggcagcgactgcatctgcacgcaggcggacagcacgatcacgtcgacgccttccaggttcatgccggcgacgatggccggcaggttggccgggtcgtggcgcgccacttcgaggttgtcggggatctccagggcgcgccagtccaccacgtcaaaaccttcttcgcggatgtagttcaccaccagttcggtcagcggcttcatgtacggcgcgacgatggcgatgcgcttggcgcccatgactttcaggccttcgatcaaggcgccggcgctggtgatgaccggggcgttggcatcgttgtcggcggtggccttgcgcaggcgttgttcggagttgcggtgatatccgagccccatggccatgatcgccaccaggcacgcataacccagcacgtctaccttggcgtcggacagttcgacggcgcaacggtcggactcaccgtccatggccgccagttcttccttgcgcacctgcttcatgcgcatgcggctggagtgaaaggtaaaacgctcgggacggatcgcctggcgcgcggtgagcatcgccgggatctcggtttccatggtggtgttggagctcggcacgatctggccgatgcggtaaggcttctgcatggtggtctccgtttttattgtgtgaggaagtcgccgagggcgtggaagaaaccgtcgaagtcatcccacggaatcatgtgcccggcgttgggtacgcaggcgacctggatgtgcggctgcaggtcctggatttcggcaacgtcctcatcgaggatcaccccgccgcgaccggccaccatcaacagggccggggccttgaggtgaggcagatcctggtggaagtccacgctgtggaaatcattgaaggcgcgcacgatggcgggctcatagcaggtgtgcagccattcggcacgcagttgcagttgttcgtcggtccaggtggcgcagaaggcacgcatcgcctcggcgtccatgccgaccagagattggcggatcgaatcgacgtaccacggcagtttgctcgggtactcacgccgacccgggccagacaccggcgggtcgatcagcaccacgcgcttcacgccctgcggatgtttgaccgcactgcgtacggcaaaacgggcgcccatggaatggcccatcaggtggtagctgtccaggttcagcgcatcggcaaaggcaccgatgtcgtcggcgcaggtatccgcgctgtagtccagttcggggccggtggaggacagcccgcgaccgcgcacgtccagcacataggtgtcgaactgctcgcccaggcgctccgcgacgaaaccccaggtgatcgcaggactggtgatgcccgggatcaggatcagcgccgagcctttgccgccgtagcgcaagtaatgctggcgaatgccgttggcctgcacgttgccgccgtagaggaaggtgctcacgcggccacccccgatttcagtgcctgggcgtacaggtcatagccgtagacccaggccggatcttcctgggtgcgcagccaggtgttggcgttggacactgcttgcacccgcgaggcgcgttccttgcggttggcttcgtacagctcgaaggcggtgcggtagtcgctgatgccggtttcctgcaggcagcgggtgagcatggcggcgtcttcgatggccatgccggcgccctgggccatgtgcggcttcattgggtggcaggcgtcgccgagcagtaccaggcgaccccggctccacagcggtagcgggttgcggttgcgcagcggccatttggtcacgctgtcggtggattcgatcaaggcttgcacggtggggtggtagcccttgaaggcgtcgaacatctcttcccggctgctgtcgacgaatgcgccctggaagtcccattcggggtggggtacgccggtcacgtagtagtactcgtcgcgcttgccggtggtgtagtagaccatcatgtggcggtcctcggtccaccacttgatgcagtcttcgaacttgtggttgtacttggcgagctggtcgccacggatcagtgcgcggtgcgcgacccagccgctgtagagcggtttttccacgcccagcagttcttcgcggatcttggaattgatgccgtcggcaccgatcacgatgtcggcgtaggtcacttggccgtcggcgaaggtcaggcgcacctgggtgtcggtttcttcgaggctttccaggcgtttgttgaagtgcagggtgccgggcttgagggtggacatctgcagcgcatgcaggtcgccacggtgcacggtgatgtaggacgcgccgtagccggtgagcggaatgcgcgagaggtagtcgccggtttcaccgcagcggctgaaccagtgctcggggtgcgaacccatctggtccagctgcttttcgatgcccatgcggcggaagattttcatgatgttggggcccatgtggatccccgcgcccaaccgggaaaactccggcgcctgctcatacacatcgacgtcgaagccggcttgctgcaacagggtggcagcggcggcaccgccgagaccggcaccgacgatggcgattttttgagtgcttcccatggggcgtgttcctctctcttggtgattctttgtgatgttcggcggcaactgtctgcaaggtttttaaagtgtatacgctcattttttgaaatgggaagcctgtcttggcaaatttattttttggccatatttatcctgtgtaacgctatgtatctagcaaatgctgggcgtgtatcgataggtaacgttatagtgcgccgcttgcagtctgttcgcaattcggttcttatcgttattaaatggcgtatacgctataaaaatgcactagagtgaagcgcagtgcatgaacttggtgcagacccacaggagacaggaaaatgccggtaagcgattgcgaattgacccagatgttcgagcacgtgttgaagctgtccaaggtcgacccgacccagagcgtcgccgtgctcaagagccattactccgacccgcgcaccgtgcgtgccgccatggatgctgcgcagcgcctgggggccaaggtgtatgcggtggagttgccttcgttcaaccatcccaaggcgatgggcaacgacatgaccgcctactgcggcgacaccgcgctcactggcaatatcgccgcgcagcgcgcccttgaagcggcggaccttatcgtcgacaccatgatgctgctgcactcgccggagcaggagcagatcctcaagaccggcacgcgcatcctgctggccgtggagccgccggaagtgctggcgcgcatgctgcccaccgaggaagacaaggtgcgggtgctggcagccgagcagttgttgaagaaggcgcgttcgatccacgtcaagtcccgcgccggcagtgatttccgtgccgccctggggcaatacccctctgtgaccgagtacggctttgccgatgaaccggggcgctgggaccactggcccagcggcttcctgttctcctggcccaacgaagaaaccgccgagggcgtgctggtgctggacatcggcgacatcctgctgcccttcaagacctacacccgcgagaagatcaccctggaaatcgaaaagggcttcatcactaaaatccatggggggttcgaggccgaatacctgcgtgactacatgaagtacttcaacgaccccgaggtgtacggcatctcccatatcggctggggcctgcagccacgggcgcagtggacggccatgggcctgcacgacaagaacgacggcatgtgcatggatgcgcgggcgttctacggtaatttcctgttctccaccggaccgaacaccgaggtgggcgggacacgcaagacgccgtgccatatggatattccgctgcgtaattgcgacgtgtacctggatgatgaggcggttgtgattgcgggggatgtggttgccccagcaggctccctggcccgctgattaacccatgtgggagggggcttgcccccgatggcggnnnnnnnnnnnnnnnnnnnnnnnnnnnnnnnccgccatcgggggcaagccccctcccacatgtagactacattcgagcatgagaaacttgagtgcatccaacaacgaagccatcatgcttccccatcgccagccatccaccgagccccgccgtgcctgattcttacgtcttttctgaacaagttggccacctgctgcgcaaggcctaccagcgccacctggcgatcttccagcagaatgtcggcgactcccagctcaccgccgtgcagttcgtgacgctgtgtgcactgcgcgatcacggtgcaagttcgctgaccgagttggtcaaggcgaccgcagtagaccaggcgaccattcgcgggatcgtcgagcgactcaaggccaaggcactgatcagcctggaaccggacccgcaggacaaacgcaaggtggtggtggacctgtccccggcaggtgccgaactggttgcccagaccgcgccccgtgccgcgcagatcagtgaattgaccatgagcaatctcaacccggccgaacgggtggcggtactgttcctgttgcgcaagatgatcgacgatccccaggaatagtcactgctggcaccgatcttgctctaagttcgtgtagtaaccacttcaccagtcaagtgtgtcgcgaggccccaggtccgtgatgcttttttttgactgtttcatgtagtgattacttcaccaactgttacgggcgaagcacatgatcagccagcacatcacagtagcgcttgaggtcaacgggcaaacacgcgaagtcagcgctatggcggacacaccgctgttgctggtgctgcgcaatgacctggaactcaatggtcccaaatatggctgtggcctaggggagtgcggtgcctgcaccgtgatcatcgatggggtggcggcgcgcgcctgtgtgtttccgttgtcgggggccgtgggacgcgagattgtcaccctcgaaggtctgggcacgcgccaggcgccgcacccggtgcaacaagcctttatcgatgagcaggccgcgcaatgtggctactgcctcaacggcatgatcatgaccgccaaggccttgcttgaccgtaaccccaaccccagcgaagcccaggtgcgcaacgagctgtcgggcaacctctgccgctgcggcacccatatcgaaatcctgcgcgccgtgctgcgtgcggcccgcctgctgaccgtggattgatgaccatgccgaacattccgctttcccgtgaccaatggctggccaaggccggcgtcctgttgatcgtcgatgaggtgctgccgccttcggggccggtggccaagggtggcacgcctacggtcaagcccaaggagcttggactgtttattgcggtcaacgatgacggcctggtgtatgcgttcaacggccatgtggacctgggcaccggcatccgtacgtcgctggcgcagatcgtggccgaggaactggacctggcgatggaccaggtgcagatggtgcttggggataccgagcgcgtgcctaaccagggcgcgaccattgccagcgctaccttgcagatatcagcggtccccctgcgcaacgcggctgccgaagcccggcgttttctgttggcgcgggcagcgggacgctggggtgtgagtaccgccagcctgaaagtggaggctggcgttattcaagcgccagatgggcgcaccaccacctatagcgaaatggtcagcggccagcacgaccagctgcgcatcagcggtgacgcgccgttaaaggccattgaggactatcgcctggtgggcaagggcgccgcacgggtggatatccccggcaaggccactggcgaactgacctacgtgcacgacatgcgcgtaccgggcatgctccatggacgggtgatccgcccaccgtatgcggggctcgattgcggcgattttgtcggcaacagcctgttgagcgtggatgagtcctccatcgcccatattcccggcattgttgcggtggtggtcatccgcgattttgtcggcgtggtcgcgttgcgtgaagagcaggcgatcaaggccgccagcaccttgcaggtgcactggaagccctggaaccacgccttgccggacatgcgcgatgtcgagcaggccatccgcgacaaccctcgcgtacgccgcaccgtgcttgaccagggccatgtcgatgaagccctggcgggggccagccagcgcatgccgcgcagttacctgtggccgtaccagatgcatggctcgatcggcccctcctgtggcgtggcggattactcgccggccggcagccgggtgtggtcgggcagccagaacccgcacctgctgcgcgccgacctggcgtggctgctggagtgtgatgaggcgctgatcgatgtgatccgtatggaagccgccggctgttatggacgcaattgtgcagatgatgtgtgtgccgatgccttgctgctgtcccgtgcagtcggcaaaccggtgcgcgtgcaattgacccgtgaacaggaacacctgtgggagcccaagggcactgcgcagttgatggatgtggatggcggcctcaacgccgatggcagcattgccgcctacgactttgaaaccagttacccctccaacggcgcgccaaccctggcgttgttgctgaccggccgcgtggaaccggtggcggcgatgttcgagatgggcgaccgcacctcgatcccgccctacgacatcgacaacatgcgcgtgggcatcaacgacatggcgcccatcgtgcgtgcgtcgtggatgcgcggtgtgtcggcgctgcccaacaccttcgcccacgaatcctatatcgatgaattggccttcgccgccggtgtcgacccggtggaataccgcctgcgctacctcaaggacgagcgtgccatcgacctggtcaaatccaccgccgagcgcgccaactggacgccgcgcaccgcgccgatgcaaaccgccaacgacgatcacctgctgcgtggccggggctttgcctacgcgcgctacatccacagcaagtttcctggtttcggcgcggcctgggcggcatgggtcgcggacgtagccatcgacaagcagaccggtgatgtgtcggtgacacgcgtggtgatcggccatgactcggggatgatgatcaacccggctggggtgcagcaccagatccacggcaatgtgatccagtccaccagccgtgtgctgaaggagcgcgtgacctttgaggagtcgacggtggcgagcaaggagtggggcggctatccgatcctgaccttccctgaggtaccgcagatcgacgtgatgatgatgccgcgccaggaccagccgccgatgggcgccggtgagtcggcctcggtgcccagcgcggcggcgattgccaatgcgatctacgacgccaccggcattcggtttcgtgagctgccgatcaccccggagcgggtattggcggcgctgaatgccggcaccttgggcgagccggccaagtcgccggagaaacggcgcaaatggtggttcggcgcgttgttcgccaccttgggcgcggtgttggcgacggcctggcccttccacaatgaaatcgccccgattgcgccgcccagcgccggcacctggtccaaggccaccctggaacgcgggcgcttgctcgcggcagtcggtgattgcgcggtgtgccatacggcgccgggcggtgcgaccaatgccggtgggctggcgatggaaacccccttcggcacgctgtacagcagcaacatcaccccggacgtgaagaccggcatcggtgcctggtcgtacccggcgttcgagcgcgcgatgcgcgatgggattggccgcgacgggcgcaacctgtacccggcgtttccctacacggcgtttcgcaatatcaacgatgcagacatgcaagcgctgtatgcctacctgatgtcccaggcgccggtgagccaggcgccgacgccgaatgccatgcgctttccgttcaatatcaggccgttgatggcggggtggaacgcgttgaacctgcgacgcggagaaatcaccccgcagcctgagcgcggcgagcaatggaatcgcggcaattacctggtcaatggcctggggcattgcgcggcctgtcattcccctcgcaatgtgatgggagcggagaagggcggcaaggcgttcctggccgggggcatggtcgatggctgggaagcgccggcactgaccggcctgtccaaggcgccgacgccatggaccgaagatcagttgttcacctacttgagtaccggctattccgatgcccatggcgtggccgcaggcccgatggggccggtggtgagtgagttgtcgaaactgcccaaggcggatattcgcgccatggcggtgtacctggcatcgctcaatggcgaagccgcagccgaggcccaggtggcggcggcggtcagcgtgccgaatcccaatggccgacgcgtatttgaaggttcatgcaaggcctgccatgccgatgggctgggaccgaagctgtttggggtgagcccgtcgctggcgaccaataccaatgtgcacagcgaccagccggataacctgatcaaggtgattctgcaaggcatcagccacccggcgaccaaggacctggggtatatgccggggttcaaggacagtttgtcgaacagccaagtggtggatctggcggcgtatctgcgcgggcaatttgcgccgaatacgccgcagtggaaggggttggagcagaaggtggcgcatctgcgtgccaaccccggcacccattgacgcaatggggtaaaacaggtgggagggggcttgcccccgatggcggtgggtcagctagacataggctggctgatgtacctgtatcgggggcaagccccctcccacattttgattgggtgtttacagggagggcggggtgacgccacgtatcactaaatcactgataaaactcagccaatcctgctgctgccctttgttcgccaggtcttcaccgaggaatgagctgagggtatgccggttggagttatagaagtagcacagcgaggcgatcatcaagtacacgtgcttgaggtcgacatcctggcgaaacaccccctgggcctggccggcttcgatgatcggctttaatacgcccacggcttcaccggacaacctgcgcatctcgccggattgctgggcatgcttgccttggtgcaggttctcgatgctcaggatcgccacgaattccgggtgcttgacgtagtaattccagataaacgccaccaggtcgcgcagggcctgctccggtgcgtccaggtccagcttgagcttgctttcggctttgttgaactgctcatagatgtgttccagcacgcagacgaacaggtgttccttgctgccgaaatagtaataaagcatgcggtcgttggagtcggcttccttggaaatggtgtcgacacgcccgccggaataaccgtcacgggtgaacaccttgaccgccgcctggaggatgcgcgcgcgggtctggtcggcctgttgggcgcggatgccggtcttcttgatcatcaccatgtcagagcgccttgcgggacagtcagggcgcgaaatatagcatgggcgttttcaggtccgttctgtgaccgacaagttctgtaataaaaacgccattgcgctggggattaaatccgcaacgggctattttggtgcgtcccaataactagagtagccatggatgaaataccaacctttcagccgtaccttgattgccacagccctggtgttgaccgtcagtggtgtgcaagccgcttcccaggccccggtggccggtgaaaatggcatggtggtgacggcccagcatttggcaactcatgtgggtgtagatgtgctcaaggccggcggtaatgcggtcgacgctgccgtggccgtgggctatgcgctggcggtggtgtacccggcggcgggcaacctgggcggcggcggtttcatgaccgtgcaactggcggacgggcgcaagaccttcctcgacttccgcgaaaaagccccgttggcggccaccgccgacatgtacctggacaaggacggcaaggtcatcgacggcctcagcgccaagggccacctggctgtcggcgtgcccggcaccgtgtcgggcatggagctggcgctgagcaagtacggcaccctcaagcgcgcccaggtcatcgccccggcgatcaagctggcggaaaacggctttgcgctggagcagggcgacattgacctgctgcacaccgctaccggcgagtttgaaaaagacaaggacatgcgcgggattttcctgcataacggccagccgatgcaggtcggccagaagttggtgcagaaggacctggccaagaccctcaaggaaatctcggccaagggcagcgacggtttctataaaggctgggtggccaaggcgctggtggattccagccaggccggcaagggcatcatcacccaggctgacctcgacaagtacaagactcgcgaactggcgcccatcgagtgcgactaccgtggctatcacgtggtctcggcaccgcctcccagctcgggtggcgtagtgatctgccagatcatgaacatcctcgaaggctacccgatggctgatctgggctatcactcggcccaaggcctgcactaccagatcgaagccatgcgccacgcctacgtggaccgcaacagctacctcggcgacccggacttcgtgaagaacccgatcgagcacctgctggacaaaaactacgcggccaaactgcgcgacgccatcgaaccgcagaaggccggtgactcccaggcgatcaagccaggcgtgtcaccccatgaaggcaacaacaccactcactattccatcgtcgacaagtggggcaacgctgtgtcggttacctacaccctcaacgactggttcggtgcgggcgtgatggcgagcaagaccggggtgatcctaaacgatgaaatggacgacttcaccgtcaaggtcggcgtgccgaacatgtacggcctggtccagggtgaagccaacgccatcgcaccgggcaaggcgccgctgtcgtcgatgagcccgaccatcgtgaccaaggacggcaaggcggtgatggtggtgggtacgccaggtggcagccgcatcattaccgcgaccttgctgaccatcctgaacgtcatcgactacaagatgaatatccaggaagccgtggacgcgccgcgtttccaccagcaatggatgccggaaaccaccaacctcgagcggtttgccgtgagcccggacacccagaagatcctcgaaagctggggccacaagtttgccggtccgcaggatgccaaccacttggcggcgatcctggtgggcgcaccgtcgctggatggcaaaccggtgggtaacaaccgcttctatggggcgaatgacccgcgtcgcaatacggggctgtcgctgggctactgaggcgtgaggtggtgatgcaggtgggccagggacagcgccaggctgtcgtgggataactggatggcggcgccttcggcgctgccctgggccgccggtatcacccgttcgaacatgtggttttcataggcctgcactgcggatgagcagtcgggtgtctccagcaggtgctgcgccagttcagccgcatccagcatcgccgcgttcaccccttcgccgccaaacggcgacatcagatgggccgcatcgccgatcagtgtcaacccctggcggtgggaccagcgatggccgacgggcagggcgtagatcggtctcgccagtaccgtctcgttcgccgcatcaaacaatgccaatacctgcgggtgccagccatggaactgggctttcagtgcgggcaggctgaggtgatcggctgcccagtcggacggtacacggaagatcgcatagccgcgcaaatgcgcgttggcgttgcgctgcacgatgatcgccttggcttctccggtaacctgcagggtgcctcggccaaccagtccggcgagatgcgggtgctgacagtctgcatcgtcgatgccgaattcgataaaggtcaatccgctatattgcggctgataggtcgacagcagcgggcgtattttcgaccaggcgccgtcggcacccaccaccaggtcgaagggcccgtgggtgagcgcgccctgatgaagtgcccagcgtccatcgccggtcggacgcacgtcggtgacgctgacaccccagctcacacagtcttgcggcagtgaatccagcagcgcctggcgcaaggcggtgcggtcgacttcagggcggtcgcctgcgctcgggttgggggcttcgaacagcaagcgcccatgctgatccatcaagcgcgagccttggtcttcgtaacgggcgatgcgtttgaacgcgtcctccaggccggcacgctgcaaggcgagttggccggattcggcatgcaggtcaagcgtgccaccttgtgggcgctccagcgggctacgttcacgttcaaacacgctggcgttgacgccatggcggtaaaggattcgcgccaaggtcaacccgccggggccggcgccgacgatggcgatgcgcaacgaggtatgcatgaagttgtccttggcgatgtttacaggatcctatacatttagttcataggatcctatggaaagtcaacgccctcatgaagattcaaacgcctgctccaaaccccatgcaacagatcggcatggcgaaccgggggttcatccgcctctacgaaggtcgcctgagagcgctgggctttgctgtcgcgcagattccggtgctggtggcgctcaagcgcagcggggggttgccgcaggccgaactggtgcgcatcgcccgtgtcgagcaatcgagcatggcccagttgctgggtcgtatggagcgtgacggcatgatcgaacgggtggctgacccggctgacaaacgcagccgcttgattaccctgaccgacgcggcgcgcgaacgcatgcccgccgcccgcgcgatcatgctgcaaggcagcgcgcaggcgctggaggggttcagtgaagaggaggaggcgaccttgctggcgttgctgctaagggtgaatgccaacctggagcgtgccggagagtagctgttcaaccactgcaaatgcgctggcgcggcgctgtgcccaatgaccacgaatcaccagggcgggctgctgatggtgctcgatccactccaggccgcctcggaagaacgcttggcggtcggccagctccggctggcagcgctggccgtcggcggtccattccacatcgtccggcgagagcagcaggtgcaggtcgtagtggcgggccagcagttcgctgtcgagccaggtggggtagtcgccgaacagggtctggctccagagcttgttggtcagcaggtgggtgtcgaggatcagcagttcgggctgccgggcgcgggcggcgtcttcccaggccagttggcctcgggcaatggccgggatgtcggccagggtggtgtcgcgctgatggtgatcgatgaaatggcgtacgtattcaccgaccatcaacccgccgaaatgcgcttgcaactctgccgccagccagcttttaccgctggattccgggccggccagtaccaccaccttcatgggtgcaacgccgggtcggcgcgccattcacgccagccttgcacggcgatcacggtgaacagcgcgtagagcgctgcggtgaggtacaggcctttgtagaggaacagcccgacgaagatcacatccaccgcgatccacagtggccagcactgcacacgtttctgcgccatccacatttgcgccaccaggctgaagccggtgagggcggcgtcgagccagggctgggcggcatcggtccagtgggccatggccgcaccgagcagcaggctgcccaccgcacccacggccaggctggcgatgatcgccggcacgcccaggctggtgacctggcgcccttgcttgacctcgccggcgcgggtccactgccaccacccgtagacctgcagcgcggcgtagaccacctgcaagagcatgtcggaatagagctttacgtcgaagaacacccaggtgtacagcaacaccatcaccagcccgatcggccagcaccaggggttttgcttgaccgtcagccataccgcgatcaccccgagggcagcggcgaacagttcaagcccggacatggtggttccttgggagagtgggagagggcggggattgtaaccaaagaagaatgctgcgggcattatctctgtagtgagcgggcttgccccgcgttgggctgcgtagcagccccataaatacggcgcgtactgcctgacagtaagcggtgtctggttttagggctgctgcgcagcccaacgcggggcaagcccgctcgccacaacaagcccgctcgccacaagcagcatcagattttgaattggcgcagcaggccgtcgagctgttcactcaggccacgcaactgtccactcgccacgctcgattgctccgccgccagcgcggtgctgtgggacaagcccgccgcctgggtgacgttctggttgatgtcttccaccacatgagcctgttgcagcgtcgcgctggcaatcgaggcgttgaggccgttgaggttgcgcagcgcctggccgatggcggtcaggctggccccggcctggccggcttgttcgatggtcagttgcgaggcgctgtggctgtcgctgatcaccttgaccgcggcttccgaatggccttgcaggcgttcgatcatgccctggatctcggcggtggacttttgtgtgcgctgggcgagcagccgcacttcgtcggccaccaccgcaaagccacgaccttgttcgccggcgcgggctgcctcgatcgcggcgttgagggccagcaggttggtctggtcggcaatcgagcggatcacttcgagcacgctgccgatctgggtgctttcggcggacagggtgcggatcacctccaccgcctggctgatggtgccggagagctggtcgatctgctgcaggctgccgtcgatattgacctggccttgctgcgcctgggcctgggcgtcgcgcatttcgctggcggcgtgttcggcgttcttggctacatcctgcacaccgtaggtgacttcgttgatggcggtggctaccagttccatctgctgggactgctgctggctgcgatcatgggcctgggtcgcattggtgcccagttcctgggacgactggcccagggcgttggcgcattcctgcaactggctgaccacctggcgcagcttggcggtgaagctgttgaagtgccgggccagttgggtgacttcgtcctggccgtgggtgtcgaggctgcgggtcaggtcgctttcgccgctggcgatgttgcccatggcgttcaccgcgtcctgcaacggccgcacgatgctgcgggcgatcagcgctaccagcaacgccatgagcaccgcgatacccaggccgataaacgaggctttccacacctggccgctgaactcggcctgcacatcgtccacgtacaccccggaaccgatgatccagccccacggctcgaacagttggatgtacgaggtcttggccaccggcgcttccgcacccggtttcggccagcgatagttgacgatgcccgcgcccttggccttggccaggctcacgaattcgttgaacaccgcaaaaccgtcggggtcgcggatggccgagaggttctggccgtcgagcttggggttggccggatgcatgatcatcacgggcgtgaggtcgttgatccagaaatagtcgtcgtggtcgtagcgcaagccgcgcacggcactcagggcttgtttctgggccgcttcgcgggtcatcacgccggtggtttcgaggccgtgataaaacgtcaggatcccgctggcggtctggaccacatgttgggtctgttggcgcttggcctggtaaaggtcgccgtggatctgcttgagcatcagcaaacccagggccagcagcatcagcacggcgactatcaggatcagccagagacgccggctgatcgacatattgcgcaaactgttcatcgtcctgtcactccgtgctttttataattgtgggcgccgcatcgacttttccgccttgtctgataggctttcggcctgtattcggaaaacctgaatactgtctgatttttcacaagatttttgcgtgccggggttgagaatcagccccgggtcttgtcgtcagtgaaccattaaaaagatcagcaaggcttgccatagagcaagacctttgggggaagcatggatttttggaccgccatacaggcattgattcttggcgtcgtggaggggctgaccgagttcctgccgatttccagcaccggccaccagatcatcgtcgccgacttgatcggcttcggcggcgagcgtttcgaggccttcaacatcatcatccagctgggggcgatcctcgccgtggtctgggagtttcgccgcaagattctcgacgtggtcatcggtttgccgagccagcgcaatgcccagcgctttacggtcaacctgatcattgccgtgttgccggcagtggtattgggggtgatcttcgccgacctgatcaagcactacctgttcaacccgatcaccgtggcgaccgccctggtggtgggcggcatcatcatgttgtgggccgagcggcgccagcaccggacccatgccgagagcgtcgacgagatcacctggaaagatgcgatcaagatcggcttcgcccagtgcctggccatgatccccggcacttcgcgctccggtgcgaccatcattggcggcctgctgttcggcctgtcgcgcaagaccgcgaccgagttttcgttcttcctggccatgccgaccatggtcggtgccgcgctgtactcgggctacaagtaccgtgacctgttccagccggcggatttcccggtgttcgccatcggcttcgtgacctcgttcatcttcgcgatgattgcggtcaaggggttgctcaagttcatcgccagccacagctacgcggcatttgcctggtaccgcatcgggttcggcctgctgatcctggcgacctggcagttcggctggatcgactggacggcggtcaagccttgagcatccagtatccgcgcttgaaggcggcgatctttatagtgttgtgcgcagcgccgttgataggggccgccctggtctggtatcgcggcgagacgctgatcccgctggcggcctatggcgtggtcagcgtgattgcgtttttcctgtactggagcgacaagcgcaaggcgcagagcgaccgctggcgcaccccggaaaacatcctgcacgccgtagagctggcgggcggctggccgggagcgttgattgcccagcaggtgttccgccacaagacgcgcaaggtgtcttaccaggtgctgttctgggtgatcgtgttgctgcatgaggtgttctggctggaccagttgttcctcggcggcactttgctctcagtcctctagcagcaacccgacctgcgtgcgcttgggcaacttgctcactaccaactggtgggagcgttgcaacaagccacgcagttcttcggcgcccagcgggtagggcgtgttcatgatgacccactgcgcacgcgccaggtacggcgccgggtggatgcccgggcgatccacatggccgaggaacagctccttgtcgaccttgaacgccagcgagtcaccgcgcaggttttgcagggcgaacatcttgttgccggcaatcgagaacacccgcactccaccccatttgtagtcttcgcgcgcgccgggcagtgccaggcagaacgccgcgacttgtgcttcggtcatcttcatagcaagcggtctccacagcctttgaagccttcctcaaggtagtcgatccaggcgcggatcgccggcagcacgccgcgccgatgcgggtagaccgcctgcagccaaccgcccggcaacgaccattcgggcagcagttgcaccaatcggccgttcgccaattcctcttcgcagtacatcatcggcagtacggtaaagcccaggcccatgatggcgctggctttacgcacgataaaatcgtcgatacccaggcgggcttccatcgccaggtcgtgggcgttgccctgggggtcgagaatgcgttgatgcaccaggcggtccgcctccagcgcgccgagaatcggcaactgcttgaggtcatccagggtcgcaacctgacgcccgagcatcagcgtggggctggccaccagcacggtctgggcctggcgcaggcgtttggtcaccaacagcgggtcttcatcgccgagttcgcgcacgcgcaaggccacgtcgatgccttcggccaccaggtcgacgcggcggttgaccagggtcatctccaactgcacctgagggtgggcggcaagaaaaccggcgaccagctccggcaggatgtgctgggccatgcccaccgggcagctcacccgcagtcgcccacggggctcgctggacatgctggccacggcctcatcggccatttccgcctccagcagcatggcctggcaatgacgcaggtagcgctcgccaacggcggtgagggtgagttgacgggtggtacgttgcagcaggcgtgcgccgaggcgctcttccagctcggcgatgcgccgcgacagccgcgacttgggaatccccagcagccggccggcggcggcgaaaccgccggcttcgacgactttggcgaaatagtagaggtcgttgaggtcttgcatgatcaacctattgtcctgtcaatgggacgaactatccgcgcctgacgagggcaaatccactacaaatgcgcaccgcccatcaacacatacttcacctgcacgtactcttcgatcccgtagtggctgccttcacggccataaccggactgcttgatcccgccaaacggcacggacgcggtgccgaccgaccctgagttgagaatcaccatgccagcctccaattggcgcgacaggcgcaacgaccgccccaatgcgctggtgtaggcataggcgaccaggccgaattccgtctggttggcgcgggcgatcacttctgcttcgtccttgaacgagtagatggcgaacaccggcccgaagatctcctcggtggccaggggggagtcgtcctgcaagccggtcaatatcgtcggctcgtagaacaggccgcccttggcgtggggtttgccgcccatcagcacgctggctccggcagccttcgcggcctccaccaggcgcacgaccttgtcgaaacccgcttgattgaccaacgggccgaccacaaagccttcacgcaggccctggtccacttcgatctcggccacggcgtgcttcacgcgtgtgatgaagtcgtcgaggatgctgtgctgcacaaagatccggttcggcgagatgcatacctggccggagttgcgcagcttggcaccgaccagtcccttcaccgcctcatccaggttggcgtcctggaacacgataaacggcgcgttgccgcccagctccagggtcatcttcttgatgctcgccgcgcattgtgcggcgagcaatttgccaacgccggtggagccggtaaacgagatcttgcggatacgcgggtcgcccgtgaggatcaggccgatcgccttgggatcgcccactaccacctccagcacgccttccgcgatcccggctttgcgggcgtattcgagcaatttgaacgcggtgagcggcgtatcctcggcaggcttgatcaccatggtgcaaccggcggccagggccgtggcgaccttgcgggtgatcatcatgaatgggaaattccatggggtgatcgcggcgaccgggccgatggcctccttggtcaccagcacagtcgcgttgcggtcatgggtggggatcgtgtcgccgtacacgcgtttggcctcttcggcataccactcgataaaacccaggccgtagtcgatctcgccacgggcttcactgaggcatttgccgttttcgcggcagagcaattcggcgaaggcttccttgtcggccttgaccgcgtcgtgccagcggcgcaggcggtcgctgcgctccttggccagcctggatgaccaggcgggaaaggcggcgcagacacggtcgacggcggctttgacctggctgctggtgttctgggcgacgcggccgacttcttcaccggtagcagggttgtagacgataagcatggggagtctccgagggctgaaagtgctgtttcaggctacgcagagacagtgtttgagcgaatatccattccaatgtgctgattgcctattcctatgaggacgtagcctggatgtggattgcgcgttaccgtggcactttgcacagaggcctggatccatggaccgtacagacagaatcatcgcgctgatggacgccctggcgcctgtcgagggctataacctgagcgcactggacgacgtgcgcttcctgcgctccaaccgtccgttgcagcgggtgccggtgctgtacgaccccggcatcgtgattgtctgccaggggcgcaagcgcggatatctgggggatgaggtctacctgtacgacgcccagcactacctggtggtgtcagtgccggtgccgttcaccatggagaccgacgccagtgaagccgagccgatgctggcggtgtacctgcgcctggacttcaccctcgcggcggagctgatggtggcgctggatgagtttccagcgctggtcgacgccaagccgcgcggcatgtattcatcgcccatggatgacttgctcggtgagtcgttgttgcgcttcctgcaagccatgcgcacgccgatggacgcgcacatcctcggcccggcgctgatgcgcgaaatctactaccggattctcacgggcgagcagggcggttcgatgcgcgccgcgttgaatcgccaggggcagtttggcaaggtggcgcgggcgattcgcaagatccatgggtgttatgcccagcacctggacgtggaggcgttggcccgggaggcgatgatgagtgtgccgagctttcacgcgcatttccgcacggtcaccgacacctcgccgatgcagtacctcaagtccacgcgtctgcaccaggcgcgtttgctgatgctgcgcagcgatatcagcgccgccacggcgagtgccaaggtcggctatgaaagcgcatcgcagttcagtcgcgagttcaagcgcttcttcgggcgcacgccccaggcggaaatccagtggatgaaacgcacctatgcgttgccggcgcctacgtcggcgtcgatgtacgtctcgtcccattgagcagggtcagcagcagcgccaacccggcgaatgctgcgccggtcagcgcctggccttgccagccgtagtgcgctgaggcaaaggcgccgctggccgagcccagggcgcccccgatgaagtagaccaccatgaaaacggtgttcaggcggctggtggcggccggttccagggccagcacgcgggtctggttggcgagctgattgatacggttgccgaggtcgaggaaggtcgccgcgatcaggatcggccaccaccagccctgggggccgaacaggtagatcagcacgaaggccgccagcacggtagtaataccgagccattccagaaaaccgccgtggcgccgagtctgccggccgatggtcgaggcgcagagaatgccgacgatggcggacaacccgagcaggcctgcctgggcgctggagaacccgtagggtggcgcggccagcagcgcggccatggagccccagaacacgttcagcgcaccgaaaaccagtgcagccttgatcgccgattgccgcagggtggggtactgcgtcgccaggccccacagggactttagcaaggctccgtacgccagtttgctggtggagaccgaggcgggcatgcgcgtcaggattgccatgaacagcagcacatccagtgcggcggcgagggcgaacatgccgcgccagcccagccagccgctgaccacgccgctcacagtacgcgccagcaggccgccggcggacaggccgctgaccatcaggccaagcaccgcgcctttttgcatggggtcactgaggtcggacgcggcggggatgatcacttgggcgctgatacccgagaggcccagcagtacgctggccaccagcaacacggcataggagggggcggtggccgaggccagcaggctggcaaagttcaggcacagcaccgcaagaatcaaggtgcgacggctgatgcggtcgcccagcggtacaaacagcaacagcccgcaggcgtaacccagctgggtgagcatcgcgatctgcccgacatgggcggtggacaccccaaatgtgtccgcaatcagcggcagcatggcctggttgtaataaatcgtggcgaccgaaaacccgcagcagatggcgagaatcagggtcaggcccttggtcagggctggggcgtgtggctgcatggcgggctcagtggtgatcgcaatggcggcgagaatgcagcgaagctggcgccaaatccagcgttgcagaggatcgggcaataactcggctggatcaggccatgctgtgcttggattgtctcactggcgggacaaacagtcgcgtttcaacggtctaatcctttattcggatcatctgtaggattaacctcacttgatcgccccaccgcgatcctcacttggagatcccgcatgaaactgttgcatatcgattccagcattctcggcgacaactcggcgtcccgtcagctcagtgcgggcgtggtcaaggcctggcaagcggctgaagcgggtgtggaagtgacctaccgtgatctggccagcgaaggcatcaaccacttttccggcgcaaccctcggtgccttgggcactgccgctgagctgcgtgatgccgcgcagaagcatgaggctgacctgagcgcttcgtcgctggctgaattcctcgctgccgacgcggtagtggttggcgcaccgatgtacaacttcaccattccgacccagttgaaagcctggatcgaccgtatcgccgtcgccggccagaccttccgctacagcgaagccggccctgaaggcctgtgcggcaacaagaaagtcatcatcgtgtccactgcaggcggcctgcacgccggccaggcatcgggcgcggcccacgaaggctacctgaagctgttgtttggcttcctcggcatcaccgatatcgaaatcgtgcgtgccgaaggcctggcctacggtgatgaagtgcgcagcaagtccctgaacgacgccaacgtagtcatcaacgaacaattgttcgccgccgcgtaaggcttgtgtaaattccgcctttgctcggtttcattctgaagccgggcgcctaaactctgtattctgctcgcctcaaaacgaacggagtacggagttttttcgtttagccgctgtcattactttggcccaggttgtgcaagcatgggtttaacgccctggacttttttcgatatgtttgttctcacgcagcaaaggtggacatccccatgatgcgtctttgtgctgttatggttctttccctgctcggcggcctgatttcagtgcacgccgcacccgcgccgcacccgcattggagtgtgggctttcatcgcatgacgtttctcgatccgctggacctgcaacccatgaaggcgatcgccttctatccctctaccgatctagagcacaccacgcaattaggcgcctatcacgtcgccgccaccgaagattccaagatcgccatcggccgtttcccgatgctgatgctgtcccacggcaacaccggtacgcccctggcactgcatgacctggccacctccctggcgcgcaaaggctttgtggtggtggcggtgctgcacccgggtgacaactacaaggatcacagtcgcctgggcacggtgagcaacctgtacggtcggccgatccagatttccgaagcgatcaccgccacccttggcgacccgatgctgtcgccgttcgtcaacgtcgaccaggtgggtgtcattggttactcagccgggggtgagaccgcgttgatcctggccggcgccaagccggatttcgaccgcctgcgccggtattgccaggagcgtccggaagatcgcgacgcctgcaccaccaagggcgaactggtggtggaccgtgacgacctgcaaccgcaatccgacccgcgcatccatgccctgatgttgatggcgccgctgagcctgatgtttggccgccataccctggccgatgtgcatgtgccggtgctgctctacagtggtgatggcgacaagttggtggcggtggataagaacgccgctgcgctggcgcgcaaactgccggagccaccggacttcaagctgttggccggggcagggcacttcgtgttcatggcgccgtgcgacagtgatcagttggcgacgatgccggcgatttgcaccgatgccgatggggtcgaccgcgaaggcattcaccgcgacctgatctccgaggcggggcggttcttcagtcacaccctcggccaatccacccgcgcaggcttgcagaccgctgatcagtaagcgcggcgcataagcagcagggtcacgcccagggccgtgaccgacaacagtgcggcacagaagaagatccagccgtagccgaggttgagcgccacggcgcccatcaacggcccggcaatcgccagggccaggtcaaaaaacaccgcatacgcgctcagccccgcgccacggctgctgttgggcacctgcttgatcgcttccacacccagcgcggggtacaccagcgacaagccgaagccggtcagcccggcgccgatcaatgccactccagtggacggcgccagccacagcagggtcaggccgagggtttcgatggtcatgcaggcaatggctgcgcggaacccgccgaaacggctgatggcagagataaacaccagtcgcgacaggataaagcacacgccgaataccgtgaggcagtacgccgcgccggcccagccgcgattgaggtagtacagggtgataaaggtagtgagggtgccgtagccaatggacgccaggcacaggctggcgccaaacggcgcaattcgcccgaacacggcccagaacggcaggcgctcgccgcgcaccactggcaccgagggtttattgcggatcagcagcaacccgagtgcggacaatactgtcagtgcgatgccgaggctgttgtagccatattccgcgaccatcaccacgccaagcggtgcgccaatggcgatggcaccgtaggaggcgatgccattccacgagatcgaccgtgcagtgtgttccgcaccgacggcgcccatgcaccaactgatggtgcccacgccgatcaggccttgggccacgcccagcagcagccgcgcaacgatcaggatacccaggctcaacgatggcaggcttgccaccagcgtggcgaagaacgtcagtacgccactcagcagaatcccggccaggcccagcacaatcgcacgcttggtgccgacgttgtcggacatgcgcccggccatggggcggctgagcagcgtcgccaggtactgcgaaccgatggtgatccctgccaccactgcgctgaaacccagttgctcatgcacatagccaggaattaccgcaatcggcaggccgatgcagataaatgcgatgaaggtgtagaagacgatggagacgatctgcagggtgatcgatatcgagctgggggcggcggcaggcatgggcactcgttcgcgggcgggcggtgcgggcatgatggcaagggcgcgggggaaaaggaagctggctaactactttgtctgatgaaccggctttgcgcggtaaacgatgccgttgtggtgagcgggcttgccccgcgttgggctgcgaagcagccccaatagaaaacaccgcgttctgtcagacagagcgcggtgtttttttagggccgcttcgcgccccaacgcggggcaagcccgctcgccacaacaagcccgctcactacaataaatcgagtgctttagaacaccacaccctggctgcgcaggtaatcgtcataggtgccgctgaagtcgatcacgccgtcggcgctcaactcgatgatgcgggtggccagggacgagacgaactcacggtcgtggctgacgaagatcagcgtgcccgggtagttctccagcgccaggttcagcgcttcgatggattccatgtccaagtggttggtcggttcgtccatgatcagtacgttcggcttttgcaggatcagcttgccgaacagcatgcggccttgctcaccaccggaaatcaccttgaccgacttctggatttcgtcgttggagaacagcatgcggcccagggtgccacggatcatttgctcgccttgggtccactggcccatccagtcgaacagggtcacgtcgtcttcgaagtcatgcgcatggtcctgggcgtagtagcccagttccgcggcgtcggtccacttgatgctgccggcgtccggggtcagttcgttgaccagggtgcgcagcagggtggtcttgccgataccgttcgggccgatgatcgccacgcgctcgccggcttcgacctggaagctgaagtccttgaacagcggtttgccgtcgaagcctttggccattttttcgaccatgacggcctggcggtgcagcttcttgttctgctcgaagcggatgaacgggctcacccggctcgatggcttgacttcggccagctggatcttgtcgatcgccttggcacgggaggtggcctgcttggctttcgaggcgttggccgagaagcggctgacgaaggattgcagttcggagatctgcgccttcttcttggcgttgtccgacagcagttgctcgcgggactgggtcgccacggtcatgtactcgtcgtagttgcccgggaacaggcgcagctcgccgtagtccaggtcagccatgtgggtgcacacgctgttcaggaagtgacggtcgtgagagatgatgatcatcaggctggagcgctgggtcaggatgttttccagccagcggatggtgttgatgtccaagtggttggtcggttcgtcgagcaacagcacttcaggatcggagaacagcgcctgggccagcaatacgcgcagtttccagcctggagacacttcgctcatcgggccgaagtgctgttccaggggaatgcccaggcccagcagcagctcaccggcgcgggattcggcggtgtagccgtccatctcggcgaactcggtttccagctcggccacggccatgccgtcttcttcgctcatttccggcagcgagtagatgcggtcgcgctcggccttgaccttccacagctcttcatggcccatgatcacggtgtcgagcacggtgaattcttcgtaggcgaactggtcctggcgcagtttacccaggcgtacgttcggctccagcatgacctggccgccggacgggtcgaggtcgccgccgaggattttcatgaaggtcgacttgccgcaaccgttggcaccgatcaaaccataacggttgccagcgccgaacttgaccgagacattctcgaagagcggcttggcgccgaactgcatggtgatgttagctgtggagatcaattactttacctatcaatgggttgcgagcgtgtcggcaggagccttcaggcatgcgtcaacagcgacatcaaggcgcgaaacccggtcgctgagcagaaaatgggggatgtgtgttggaatttggcgcgcattgtcgcatatgtcaggcgacagttgtatgtccggcgaaggaaggtttcgccagggtctccggcattgccagccataacaacgccaaggccagcgctgcgaccccggccagagtcaggaatgccgcgttgtacccggcctgttgcaccacgaaacccgccaggctgctgctcagtgccgcgcccagaccaaacacggtggaaagggcgcccaggctgacgttgaagcggccggtgccctgggtcaggtccttgacgatcaccgggaacagcgcgccgaagattcccgcgccaatgccgtcgagcatttgcacggccaccagccaataagggtcgctggacaaggtgtagagcacgccgcgcagcggcaggatcatgaaaccggccatcagcagcggtttgcgcccccacaggtcagccttgagcccgaccagccaggccatcggcaccatcaccaactgggcggcgacgatgcacgccgaggtcagtggcgtggccatctgcaggttgatctgcgacagcttctggctgaccagcggcagcatggcggcgttggccaggtgaaacagcgcgcagcagatggcaaacagtagcagcgggcgattcgccagcagcactttcatgccggatggttgttcatggtcggtgtgatgtgccgggtcgaagccgcgggccacttcatggtcgatggcctcggcggacacacagctgatcgcaacgatgctggcgagtgccatgaacgccatcaggtaaaacaccaccactggaccaaacaagtaggccaggccgccggccaacagggcggccacggcattgccggcgtggttgaaggtttcgttgcgtccggtgcggcgggtgaacgcgcgcggcccggtgatccccagggagatcgcggaaatcgccggtgcaaacaccgaggcggcgacggcactggcggcctgggtcaatgccaccaggctgaacgagctgacaaagggcagcagcaggcaactggcggttaccacaatagcggccagcgcgatcaccgcgcgcttgctgcgggtgcggtcgatcaatgcgcccgccgggccttgggtgatcaatgcggcgatacctgccagggtcatgaccacgccaatactggccgggtcccattggtgcacggccagcaggtaaatggccagatagggtccgaggccgtcgcgtacatccgccaggaagaaattcaggctgtcgagggacaaggtgttacgcaggtcggaatgtttggccacggcgagcacttcgcaagcggtgttcaaggactgaacacgcattgcgttagtgacccgcaggcgttgcgttaagtttcgtgcgttagccgggttttattccgtgggtacatggcttattttctgagcccctctgtatggattatctggagacgcaatggacatgccctcagctcaacaggcgattgcctgcaacaaagacgcctgggatcaatcggccggcctgcacaagaccaccgacacctggaacgcgttgctcaatagcgtcggccaagctgacttttcctgcctggatcctacgattaccgggctgctgcaagacgttggcgtggccggcaaagatgtggtgcaactgtgctgcaacaatggccgcgaaagcctgtcgctgtttggcctgggcgcacgttcggtggtgggcgtggaccaatccccggcgttcctccagcaggcctgggagctggccgatgtctcgccgcacaaccctgagtttatcgagagtgacatccatcatctgccgcaggcgttacacgggcgctttgacatcgccctggtgacaattggggtgctgggctggatgccggacgtggcgctgttcatgcagcaggtcgccctcaccctgaaacccggcggcaccttggtcatgtatgaaacccacccgtttctggaggtgttcgatccacgggcgccaaacccgttcctgccggccagttcctacttccagcacgaacccttcgtactgcaggagtcgattgtctatgaggggcagggcgaggtggccgggccgacgtcctattggtatgtgcacaccctgggcgatgtggtcagtgccgcgattggcgcccagttgcagatcgttcacctgcaggagtatccccactccaaccgcgaagaactctacgaccaatacgagcaccagcccgcacaattaccgatgtgctttaccttgaccgctaccaagcgtctcgactgaggcgtctttcagtcgcggcgcacgaacgtgcgcatggtttgcccagggcctgtgctgaacgtggttggcctgggcataccttcgtcggcggcaatgaacacaaattcatcaccgtcgaggcgataactggcgggcaagtgtttgccggcgtcatctcccatggagtcgatccaggtaatgcgcttgggcactgtgctgctgtcgaggaaaaaacgtcctgccagcaatacctcgccgctgaccgtcttcacttcgaagccgtcgccgctgatcgtggtgattgcgccaggggccgtgtgcgcgtcgatggggttgagcacgccgctgtcttcgagtgaggtttgctcccacgcaccttgcagggcttgaaagtctgggtctgaaagggatgacatacaaattcctttttgttgaaggggaaatcgtcgatggcgatgccttttatcatttgaagctggattacgcagcacattcgcaagacagcttttcacaattcttagttaacttttggttacaacctgtggctaaataactgcaaagggccacgcgccgggtggtcactcagccggtcgtgccgattgtgtgaattgtgatttcaggtgctgctatccatcctcgtccgttgtgggcacgcaggagcagcctgttctcttctgacttgtgacgaaatcccttgaaactcatcattgttgttctctacgttgcctcgattgcgtatgtacacttacgtggccgggtgcggcataagctgggccgccaactcagcgatcattcgaccttcctggcgccgatcaactgctttctctatctcttctctaaactacccagccgaccctacctgtcgcccaacgatttccctgacctgagcccgctccaggaacattgggaagagatccgcgaggaaggccagaacctgctgcgcgccggcgaaatcaagcgctcggagcagtacaacgacgtgggtttcaactcgttcttcaagtcgggctggaagcgtttctacctgaagtggtatggcgacagccacccgtcggcgatgaagctatgcccgcgtactaccgaactggtgcagagtatcggttcgatcaaggccgcgatgttcgccgaactgccgccgggctccaagctggtgcgccaccgcgacccgtatgccggctcgtatcgctatcacctgggcctggacacgccgaacgacccgggctgctacatcaacgtggacggcgagaactactactggcgtgatggcgagccggtgatgtttgacgagacctacatccacttcgccgaaaacaccacgcagcagaaccgcatcattctgttctgcgatatcgagcgcccgatgaaataccgttgggccgcggcgttcaatcgctggttcagccgcaacgtgatggcggccgcgggctcgcccaacgatgccggcgacaagaccggcggcctcaaccgcgccttcacccggctgtacaagattcgcttgcgcggtaaagagctgaaaaagcgcaaccgtacgcgttactacctggaaaaatgggcgatcttcgcaaccctggcggcgatcttcctgctcatctgagtgtttcgggcgccattcactccagtggatgagcgcccagtttgtcccacatcttcttgctgattttctgtcgattggcatagccgtcccagggatcgcccttcaagccatccaggcgctgctgcaggttggcgaccgtccattgctgtgcactgcgcaaccccttcaattcctcacgactgaccggcaccgacaccggcaaacccgggcgtgcccgcacagagtaggcggccacggtgctggcgccccgcgcattacgcaggtagtcgatgaagatcttgccgacccggtttttcggtcctgacgtcgcggtgaagcgttcaggcagttgctcggtcatgaattgggcaatcgctttggcgaacgccttgacggtgtcccagttgtctcggcgcgccagcggcacgaccaggtgcaggcctttgccaccactggttttgacgaaggcttgcaagcccagctcgtccaagaccgagagggtgagctgcgccgcttccagcatggttttccagggcagcgccggatcagggtcgaggtcgagtacaaataggtccggggtttcgatcttgtcggcggtggcgccccaggtatgaaactccacggtgcccatctgcaccgccccgagcaacgctttggcactgtcgacttccatcaggcgcgcgtggccagggtcgagcgcctgatccagctgcttgatgttgggaatggccaggcgctccgaatgtttctggaagaactgctctccctcgatgccttcaggcgccctcagcagtgacacgggacggtggcgcaggaacggcaggagccactcgctgatgccgttgtagaactgcgccagttgctctttctgtgtgccgctctgctggtcgatcacgcggtctgggtgggtgatttttacgctgccggtgttttttttggcaggcttcatggatttgctcgtgcgcggttgctcatgaatgatctgcgcggccggcttgtcgctgcgcattgcgacgaacgccgcctggcgcaccacgcctccacgggtccattcggcaaactgcacttcaccgaccaaggtcggctccacccagtgcacgccacgggcctgggcactggtcagcggtttccccagcggcgatgacgtgcgctccaatggcgtgagttgcgcatggatcgccttcagtgatgcttgatcaaatccggtgcccacgcgtccggcatacaccaatcccgacgcttcattgaccgccagcaacagcgcaccgaaaccactgcgcgaaccctgcggccgggtgtagccgacgatcacgaattcctggcgcaggcggcatttgagcttgatccaatcggcgttgcgactggacacataagggctgcccaggcgcttgccgatcacgccctcaagggccaggtcacaggcgctttcaaaaatgtcccggtgatgggcggtaaaggcttcggagaatcgtaatagcttgcttctgctgccagccaacgcagtctttagcgccgcacgccgatcctcgacgggggcctcgcgctgatcctggccatccaggaatggcgcatcgaacaggtagtagacaatgtccaggctgcgcccgatatcgaaggcgttttgcagcgcctggaagtccggcaggccgtcgccgttcaggctgactacttcgccgtcgagccagctgtcgttgagcttcaaagcttgcaaggccttggtctggcgcggcaggcggtcggtccagtcgtggccgttgcgcgtgaacagccgcacctcgccgtcgcggatgcgcgcgagcatgcggtaaccgtcgaacttgatttcgtactgccaatcgccctcgggcgcgcgatccaccagggtggccaattgcggggtgaaatgctcgggaagggtcgccttggtttttcggggttttgcgcgaggcttgggtttacccaccgaggcggcgctgagcacgctgtccggctgggcctggacaatatcgtagtcttcggcggggcgtgcctgcgcgtcctgttccttgatcagcagccattgctccttatcgccgctgcccttcaggcgtgtgcgtaccaatgcccaatcgcccgaaagtttttcgccgaccagggtgaacttgagcttgccggcggcgtaggctttgcgcggatcgtcatggggttgccacacgccacggtcccacacaatgacctcacccgcgccgtactggcctgccgggatattgccttcgaagctgccgtagtcgagggggtgagcttcgacatgcacagccaggcgcttctgtgcagggtccaggctcgggcctttgggcactgcccaactgagcagcacaccatccagctccaggcgaaagtcatagtgcaggttgcgcgcggcatgtttctggatcacgaaggacagcgccgacgccttgcgtttacctgcgggcgcactgcctgccggttcacccgtaatgccgaaatcgcgcttgcggttgtattcgctgaggggcttgggcatgacttatgaggccttggtggatttcttcgcggcgggcttcttggcgggtttgccggccaggctgcgcttgagcagttccgtcaggtcgatcacgtcggcggacttgcgctcttcactgtcttggcgggtttccacatcttcgatcttgccggccttggccttcttggccaccagcgccatgattttttcctggaagctgtcgcggtaatcatcgggttgccagtcggcgctcatgtcgtcgaccaggcgcttggccatgtccagctcacccttggccagggtaggtttagtcacgtcgctgcccagttccagttcgtccaggctgcgcacttcggccggccagcgcagcatcaccaataccagcgccgactccaatggcatgagtgccgccaggtgctgcttggtgtgcaggaccacgttggccagcgcgacttttttggtcttgctcagcgtttcccgcagcagcgcgtagaccttgccaccgcgcttgtccggtgccaggaagtagggcgtgtcgatattctgcagcgggatctggtcactggcgacaaacgcgatgatctcaatggtctgggtcgacttggggtgggccgaacggatttcctcttcgctgagcaccacgtagcggcctttcttgaaggcgacacccttgacgatattgtctttagtgacttccttgccggtggtcttgttgatgcgcttgtagccgacccggtccatgctgcgcttgtccagccagtcgaagtcaacgccctgcgatgacgtggccgagaccagcgacaccgggatatgcaccaggccaaagctgatggcgcctttccagatggctcgtggcatagctgcgattccttgagtagaggctgtgtgcggatgactcggcgccggtgtggaaagtttccccaggcggatgcgcggacagatcgtgttacacctgatgagaaagtatttagtgtcgaaaggcgaaccctgggcgtagcgtgttatcgaaagcacgtactcctcactcccgagaggctttgtcaatgaacacttgtatgcgtcacgttgcagcgctgctgttgggcctggccctggttcccgtggtccaggcgcaaaacctgcccggcagcaacaacgccaacaacggcccgatccaccgggccaaccccaacagcatgcagggcacccagcccaacgcgccggccattcgcgggattcagaccgggccgaccacccgcacgccgaccctggaaaacggcggcattggcaacagctatcccaagcgcgacgccgcccccagccgcccggccaccgaaaccaaagcccccacttatgatgccaacggcaatcgccggtaaggattccgtcttatgtttctacgcaaaaccctgctagccgcgctgtgcgcaacctcgctgttgccgttgacggccacttttgcaactgatgcccagcagttccccagcgaacaaggcagtctctccgtcacgccgatcgccaaaggcctggaccacccctgggccgtggcctttctgccggataaacaaggtttcctggtcaccgagcggcctggtcacctgcgctttgtcagccccgacggcaaactttccgcgcccctgaccggcgtgcctgaagtgtgggccaaagggcagggcggtttactcgacgtggtgctgtcgccggacttcaagcaggaccgcatggtctacctttcctacgccgaaggtggtggcaaaggcggaaccgccggtactgcggtagggcgtggacgtctggcggctgacctgagtggcttgactgactttaaagtgatcttgcgccaggagccgaagctgtccaccggcaaccactttggttcacgcctggcgttcgaccgcgacggttatctgttcgtgactctgggcgaaaacaacgaccgcccgactgcccaggacctggacaaattgcagggcaaggtggtgcgcatctaccccgacggccgcgtgccggatgacaaccccttcgtcggccagcccggcgtgcgcccggagatctggtcctacggccagcgcaacccccagggtctggcgttgaacccctggagtggcacgatctgggagaacgaacatgggccacgcgggggtgatgagatcaatatcatcgagcgcggcaagaattacggctggccgttggcgacccacggcatcaattactccatggcaccgattcccgaagccaaaggcaagaccgcagaaggcaccgtgccgccccatcatgtgtgggaaaaatcaccgggtatcagcggcatggcattctacgatgcagaccgcttcaaatcttggcagcacaacgtgttcatcggcgcgctggccagccaggagctgatccgcttgcagttcgacggtgacaaggtgattcacgaggagcgtttgctgggcggtttgaaagcgcggattcgcgatgtacggcaggggccggatggctttttgtatgtgctgacggatgaggataatggcgtgctataccgagtcggcctcaatcaggactgaagccgacgacaacctgtaggcgcccggcttgccggcgatggcgatttgagcaacgccatcgccggcaaggtttacaggcccaggtcagacagccccggatgatcatccgggcgccgtcccagcggccagtggaatttgcgctcgctttccttgatcggcatgtcgttgatgcaggcaaaacgattggccatcaggccgttctcgtcgaattcccagttctcgtttccataggaacggaaccagttgcccgaatcgtcgtgccactcataggcataccgcacggcaatgcgattgtcggtaaacgcccacagctccttgatcagccgataatccagctccttggcccatttacgggtcaggaaacccttggcctcttcgcggttatgggcgaactcggcgcggttacgccactgcgtgtcgagggtgtaggccagggacactcgatgtgggtcgcgggagttccagccgtcttcggccaaacgcactttttcgatggccgatgcgcgggtaaacggcggcaggggcggacgtgtttctgcagtcgatgacatggggcagttcctcaaacaatcagggtgggttgaaagttgcgccgttgtgcgatcaaagtcccaacaaggtttgcgccatgcattgcgcattatcggcagctgttgaatcgcccatcaccagggcaacggtaatggcgccatcgaccaggatcagcaggtgcgcggcctgccgttcagggtcgggggtgccatgtgcttgacacagttcgagcaggtactcgaacagtttctgtttgtgggccttggccaactggcgcaccgggtcctgcgggtcgccggtttcgccgctggtgttgatgaaggcacagccacggaaatcggcggagccaaaccaggttttcagtgcatcgaacaccgccagcaggcgctcgccggtgccttcgctgcgttccacctctgtgcgcagccacagcatccagcgctcgtcgcgccgctgcagggcggcaatcaccaaatcgtctttattggcgaagtagcggtagatgctttttcgcgagacgccggcggttttcaccaggaagtccatgccggtggcggcgatgccgtggcgatagatcaacttttcggtgacgtcgaggatgatgtcgcgggtttcattatgggtcatgtcgttcatgttgcgaacagtagaacgatcgttcttcttggtcaattaaaatttttccatgcgccacggcaagacctgaggccccccatggtgtaagctcggggcctcttcggattcgacccattgcgagccttatgccgtcgttcttcaaacgctccctgttgcccaaactgcgcggttttcccctcactcctgatgcgattgacgtgctgtgcggcgccgctgcctatcgccgctgcctgctggagaaaatcccccaggccacccggcgcatctacatcgtcgcgctgtacttgcagcaggacgaggcggggcaggagatctacgacgccctgcacgccgccaaggcagcgcgaccggagttggacatcgtggtggtggtcgactggctgcgcgcccagcgtggcttgatcggcgccggcaagcagccgggcaacagtgcctggtaccaggccatgacccagggccacagcagtgaagtgccggtgtatggcgtgccggtgcaaacccgcgagttgttcggcgtgctgcacctcaagggctttgtgatcgacgatacggtgctgtacagcggcgcgagcctgaacaacgtgtacctgcacaagttcgacaaataccgctacgaccgctaccacctgatccacagccaaccgctcgccgactccatgcagcatctggtggagcacggcctggtggcctccaaggcggtgcatcgcctcgacctgcccaacccgcccagcacccgcagcctgcgcaacgacattggcgacctgcgcagccgtctcaagcacgcgacatacgacaccaccaccgggcaattgcccaacggccatctgtcggtcagcccgctgctgggcgtgggcaagaacaatccgttgagccgggtgatcctggagctgatcgccagcgcccagcatcaactgaccatctgcactccgtacttcaacctgccgctgccagtgacccgcgaaatcaaccgcgccctggcgcgtggggtaaagatcgacatcattgtcggcgacaagaccgccaacgacttctacatcccgcccagcgaaccgttcaaggtgatcgccgcgctgccgtacctgtacgagatcagcctgcgccgtttcgccaagcgccatcagcgcgacatcgaccacggccagttgaacctgcacctgtggcaccacgacgacaacacctaccacctcaagggcatgtgggtcgaccagcgctacaccttgctcaccggcaacaacctcaacccgcgcgcgttccgcctcgacctggaaaacgccttgctgatcgatgatcccaagagcgagtggctggagccaaggcgtaccgagctggcacagattttccagcacaccacgcgtatcgaacggtatcaggacttgcagacgctgcctgattatcccgaggcggtcggcaagttcctgcgccgggtcagccgggtacgaatcgagcggttgttgtatcggatcctgtaaaacccgcaggcaaaaaaagacccagccccttcaacagggctgggtctttttttgtgctgcttagttcaggcccagcttaccccgcaaggtggacaggtcttccgccagggtattgaccggacccaccagggccttgcggtcgttttccttgaccttgtcataggtttcgaaaccgccatccttggtcttgtacttggcgaggatcttgtccacgctggcgaaattcttgtcgaccttggccaggaaggccttgtcttgcttctcgatctgcccacggaacaggtcgacgattttcttcgcgccgtcgatgttgccctggaagtcatacaggtcggtgtggctgtagcggtcttcttcgccggagatcttggtggcggcgacttcttccagcagcgctgcggcaccgcctacgactttctcgggcgggaaggtcaggccgtcgacgcgggtcttgaggtcgttgacgtcggtgttgagcttggcggtcagcgcttccaggcccttggtggtgttctgcgagaacagcgcgtattcgatacggtggaagccggtgaagtcttcggcggtcacgcctttttcgtggtcgtcgacacgggagtcgatggacgcatcgaggtcgctgaacagctcggcgatgggctcgatggactcatagtgcacgcgggtcggcgcatagagcttcttggcggtggccaggtcgcccttgttgatggcgtcggtgaacgcctgggtctgggtgaccagctcaccgatttcctcggtgacgtagatcttgtagtccgacaccggccctaccaggtccagcggcgcggtggcggcgaaggctgccagcggcgaaagggtcagcaacaacgacaacgcaatagtcgacttcttcatgggacggtatccgctctgagtgtgtttttaggtattggcagtggtttgagggtgcgttgcagcaagcagcgtgcgcccgatgaaatcctgggccccggtgacgcctggcaaggtgaagaaatacccgccgccgaccggcttgaggtattcctccagcggctcgccgttgagccgggtttgcacgctgataaagcctttctccaggtcagcctggtagcagatgaacaacagccccatgtccagctgaccgttcttgttgacgccgttggagtagttgaacggccgacgcaggatcaggttggcctgggtctgcggggtgcgcgggttggccaggcggatgtgggcatcgagcttggtcagtttgccttccgggtccttgctgtagtcgggcacttgggtttcgttgtggccatccatgggcgcaccggtgggcttgacccggccgatgatgctttcctgctcctgcaacggagtgcggtcccagcgttcgacgaagttgcggatgatgcgcacggcctgatagctgccgttggcggcccaggccggttcgtcgctgccgggctgcacccacacaatctgattcatggccttggcgtcgttggagttcgggttggccgaaccgtcacggaagccgaggaagttacgcgcgctctgggccggctcgccgggcttggcaggcgcctggggcggtacgctgccttcctgcttccagcgcaccagcagcaggtcgggcaggtttttcacgatgtcgcgcaaggcgtggatattggtgtccggggtgttggagctgaattgcaggctcaggtcgccgtggcattgcgccggctccagcgcatcgttggggaacccgaccatgcggctcaggcgcttgggtttgactgccgtgaggccaaagcgctcatcgaacagcgattcgccgacggacacggtgatggtgaggttgtccggggtgaccaccgggccgaggatgccggagtcggtgggcggcagtttcgggtcgacctgcggcacggtgccgccggtcatgagaaaggcgatgcgttcgttcagcgtacggaacaggcgctccaggtcgtcacggtcgctggctagtacgtcgaacgcaacaatcatgccgcaggccgggcgtggggtgacgataccgctctggtgtttgccgaagaaatcgtggtggtcctgggtcttgtcactgcgcggcgcggtggtgacttgctcggccgcagcggccatggccgggcaggtcagggcgctgccggcaatcgcggcaccggtggcggccatgcccagcaggacacggcgacgctgaaggttggtgtgttctgaatcactcatgtgtgcggtcgtcttcactgcaggccggaaaggccaagggcggggtcgattccatcgagtgcaacggccagagccttggccttgccggcgatctgcttacgctgatcggcggttacggtgtcgtaggtggcgtagcccttgtcgaccttgaagccttgcagttcggcatcaaaggcggcgagggcgctgtcgattccaggcaacaggtcggcggcggatttggtcagcagcgggcgcatcaactcgaccaccttgtgggcggcctccaggttggcggcgaaaccattcaggtcgacgtggctgtagcgttcttcttcaccgctgatggcgcgtacatcggccaggctgttgaggttgcgcaccacgatgctgaccaactgctccggcggcagggactgggccagcaattgttgtttgagggcgctgacgtcggtcagcaggcgctgggcaaccggcgccagcccgtcaaggctgcgttgctggaacagactgtattccaggcggtggaagccgctgaaggccgggtcctgttcgcgtttttcaaaatagtcggcacgggcgttgatcgcgttgtccagttgcgcgaggcgttgcgatgccggggccaggcgttggtaagcctcccgggccggtacgtagagcgcttgggcctgggccaggtcgccatggtcgatggcctgttgcaacgcgctgaccgccttgaccagtgcgctgccttggccgctcaagtacacgcggaattccgacaatgggccaatgaacgccaccatcgacggtttggccttggcctgggcgtcggactcggcagtcggtgttacgtgcaaggtgccacgcgggttgctcagcaggccacaggtgatcgcgtagtcaccgggcaacaggttggcgttgatcacctggctaagcccgggggcgatgttttcccgttcttcgaccaccagcacgccgtccaggatctcccattccaccgcacgatcggagcggttgatgatgcggaagctggcgcggccggcggggaccgtcaattcattcggttcgcaggcgtgaccatgaatgatcacggcgatttcattttggttggcctggcgcttgctggcggccagctgtgaggcgtaatagaacaggccaccggcggcgatcatcacgaccaccgagcccgccacagcccagcgcagggcgcgaggtggcgaaggcggttgaggggttgggttggacaagagacggtccttactgactggaagcggaagagggtgtgatggcctgcttgggtggcgcggcgggcaggaagaacatcaccagcgccaccaccaggtaaatcaggtaggcgccgagggtgctgacggtgggcgcttcctgatagccgaacatgccggcgagaaccgaacccagcgggctgtccatgggcagggcggcgctgaagtcgaagagcacggtttgcaggtgattccacacgcccgcttcgtgcagggcctgtaccgaattggcgaggatgccggcggccaccaccaggatgaacaagccggtccagcggaaaaacgcaccgaggttcaggcgcatgctgccggtgtagatcaggaaaccgacgatgatcgccaggatcaggccgagcagggcgccaatcggtgcgccggggccttcgctctgctggaacaccgccagcaggaaaaacacggtttccaggccttcacgggccacggcgaaaaacaccatgaggatcagcgcagtgacttggtgtttggacccggccaacgcgtgatcgagggattcgtgcagggagtgcttgatggaacgcgccactttacgcatccagaacaccatggaactgaggatgcccacggcgaccaggccaacgatgccttcgaacagctcctgctgcttttgcgggaactcggcgctgaccagctccagcccaccacctaccagcagggccagtgcggcggcgagaaacacgccgatccacaccgcaggcatccactggccacggccggtctgttgcaggtaactggcgataatgccgacgatcaatgcggcttcaatgccttcgcgcagcatgatgagaaaaggaacgagcattcggcaccgcgtcacaactagataggaggctaagttgtaacataatgatactcattactaaacaggcaatcttgacaatagctgaaccctacctgaacggtggtggcaaaacgcatcccaccttatgatgcgtgccattatttgcgccgccggatgcccgtttcgccatgtcggaaaaagacaccatctccctccacctcgtgcgcgaagccttgctgcaaagctgcgcgcccggcgcggccagtgccgaagtgctgcataaagccgggattgacccggcactgctggccgagcccaacgcgcgggtctcggccactacctacgcacgcctgtggcgcctgctggcgcgacgcatggatgatgagttcttcggcatggacccgcgcaagctcaagtccggcagcctggcgtttctctgccgcgccgcgatggcgcaacccaccctgggcaccgggctggaaaccggcttggggtttctgtcgctgatgctggagcgcctgcccgccgagttggtgcgtcaacaaagcctggcggagatcgtattgctggagctcgagtccgaacccaatcgggccttcacatactttacctattggatgatcgtgcacggtgtggcctgttggctggccgggcggcggatcccaatcctggcgattgagctgcgctgctcaaaaccggatttctgtgatgactaccaggtgatgttctccgacaacctgcgtttcaaccggccccgcacccgcatgatcttctccgccgactgcctggacctgccgatcaagcgcagcccggaggagctcaagcgcttcctggcccacgcgccggccaacatcctggtcaaataccgcgaccccgccagcctcgccacccgcatcaagcacgacctgcgccagatgcctcctgacacctggccggaaactgacggcctcgccgccagcctgtgcatttccgcctcgaccctgcgtcggcggctggcggaagaagggcagacctatcaggggctcaaggacagtgtgcgcaaggagttggcgattgtgtggttggcggagccgcagatcagctttgccgaaattgccgagcgactgggctttgccgatgcaagttcgttttataaggcgtttcgtaaatgggtggggtcgaacccggggcattatcgaagtttgattctgaatgaaacaaacaagcggtaacggtgtggatgtgcgggattaggaaataacttacccgcttcttctttcggatgacagaacggtccttcgctattttaggaagtgctcggcttgccgccatttcttcttcgtgcatagttatcctcacggtacctgaatacgcctattggacgattcgattaatgtgctgcgcttacccgcgacggcgggtgtgcgctgctgaatcgagggcagcctatgcgcaaataaaaacagaacgattacatgaacaccaacaatcttaatggcttgaggtggaaatcatgaaaagtagttttgcgttggtttttgcgggattgatgttgatgtcggcgcaggcgtcggcgttgtgtacctatattacggagagctacggcggcactattccgccgaaaacggcgatacctgccaaagggccttttgagaacacctccgttaatggctgtttgaacgccagtattgatgccatcgtaacagccaccggtgcagggaacaccccggagatctatatcgaaggcgaggtgggaggtggatcatggcgacggttgacgttcagtatcggcagcaacgcttcttgggtaggtccgttcggtaagtacagggtggtggtgtataacgacgactcggtaccaaaagtctactcgggaagtgtcaggtacggtcgttgaaaccgaacctatgcagtgtgccggaagttatccggcacacggccttctgtgaggtaaattcagaaatcatgcacgctcgtcaattgataaatcgtcatttgacgagtttgcgaaataggccaatgcggcgagcgcgtgattcgctgccaccagtcctctcataaaatctgaagcaccctcctgatgtgctacatatggattgcttttgaaaaagtctatatatccctccagctgctcgttaaataacgcgacggcattgaatttgacatgggtctctgcaggaagtccgtttgcatcaaacgctccgtttcctacgacgaacagccaataagcgcgggaatcaataatgcctttgtcgtagagttcgctacctacttttttcaggtcgttactgctgatcgacgtcatgtcgtggcccttcagaaaactcttcaattcactgatttgctcctgctgccaaaacttcagtgtctctgccgcttctgcttcttcagtcttagtgaatgcgttcacgacttgttcaggatttttgatggtgtaaccaggggttgccattgagttctgcacttgacctgtcgctgataaggtaaccataaaaagcctcaagtagttggggttacatctggttgtcgacaagttggtgagtttcttaagtgctgaaaatgtttcgtattggggtggcgttattgtcagtgttgagcggttgtgtgggattgtgcaggtgggcatggtattaggagtgtttgcatgtggactaccttcatgtctgacagaactgtctggcgatgttttagataagtcctgaaccgcctgacttgtctcaagggactacagaaaggtccttcgctattttaggaagtgctcggcttgccgctgtttatttttcatgcatagttatcctcacggtacctgaatacttctattggaagattcgatcaatgtgcttcgcttacccgcgacggcgggtgtgcgctgctgaatcgagggcagcctatgcgcaaataaaaatagaacgattacatgaacaccaacaatcttaatggcttgaggtggaaatcatgaaaattagttttgcattggtttttgcgggattgatgttgatgtcggcgcaggcgtcggcgttgtgtacctatattactgacagctatggcggtattatcccgccggaaacgaccgtcacagcaaaagggccatttgaaatcaccccttcgaacggctgcttgaatgccaacattgaggcgatggtaacgcccacaggagctggcaaaacgcccgagatctttattgaaggcgatgtgggtggcggatcatggcagcggttgacctacagtatcggcagtaacgcgttttgggtggggccgtttggcacctatagagtgcgggtatataacgacggtccagtaccgaaagtctattcaggcacggtcagatacggtcgctgaaaccgaagggatgcagcgtgccaagtgatcttcggcacactgcatccgtcaactctgaaatcagacgcgctcgtccaccgacaatttatcgtttgaagaattggcaaagtaggacagggcagcgagcgcatgattagcggttaccagccctttcataaaatccgatgccccttcctgacgcgctatgtagggattgcttttgaacaagtcaatatacccctccaacttttcgttgaataaggcaattgcattgaatttaacatgggtgtctgctgggaaaccgtacgcatcaactgctccgctcccttccacaaatagccaaaaagcacgtgaatcaatgagacctttacgataaagctggcttccgattttcttgaggtcgtcactgctgatcgatgtcatgtcatagtccttcagggcgttcttcaactcgctgatgtcctcctgctgcacaagttttaaagtttctgtagcctccgcttcttcggtgatggtgaattgattgacaacttgcccagggtttttgatggggtgggctggagtggccattgaattcggtacttggcttgtcgttggtaaagtgaccatgaacagtcctctgttaatcgggcctacatctggttgtcgacaagttggtgagtttcttaagtgctgaaattgttacgtttgaggttggcgttatcgccagatttaggcggtggcgtgggcttctgccggcagggcgtgatattaggaattttcacgcgttggactacttcgagatctgacagaacggtctttcatgtttttgggaagtggccggctttcctcttgcgatcattcaggcatagttaatagcacgcagcctactgaagggttcgatctatgtgcagcatgtcaccgtgacgaccggtgcgtactgccaaatcgagggcgatatatgaaaaaacaaaaagattgctgatgagtgttcgcaaaaacttaataggattaacacttgaggtgaaaatcatgaaaagttttctcgcattaccttatttagtgctgatgttgatgtctgctcaggcgtcggctttgtgtttgactcttacggatagctacagcggaataattcagcctgactccagggcggtagcactgggtccgttcaccatctcgggagctaacggctgctcgaacgcaaatatcgacgcaatggtatctgcagcaggcggaggtagaccgcctcagatatacatcgagcagcaggtgggaggggcttggaaaaccgtggccggtaaccctttgtcagcctacgcctcatggctcgggtcattggggacctatcgggtgatattggataaccccgaagcggtctccaagtcgtattggggaacggtcagatttggccggtaatgccctgatagaaccgggtgccaagggttcggttggcacccggtgtcgaaagaacccgcttcaagcacgttcctctatagaaagatcacttcgggaggagttaacaaaaaacgccagcgcattgatagcgtgattggcggcaaacatcccttgaatgtattcagggatgccttgcgagcgctgcacgtcaggacgcccctcaacaaatgacaggtaatcctcaaggacttcatcgaacaaagcgattgcgttgtactttacatcggtttcagcgggctggccgttttcatcaaaggcgccgaggcctgttatgaacatacgaaagccctggccatcaatgacgccactttcataaagccgccttccaacgacttttagctcattggtggtaatagacgtcatatcgtaatctttcaaaaacgctttcagatcatcaatcgactgttgattacccagtttcaacgtgtccgacgctttcgacgcgtctgttatcgtgaatttattcaccacctgttccgggtgctttatctgaaacggattagacgccttcgtgtgcctcatttgctccgcagtcaacaaaacggccatagtgaaattctccatcagccgaaagctacatctttgtatcgaccttccttgaacccactttaaaaaaagccccgtgaccgaatggaccacggggcaaaaaattggctggatgcgaccaaccaaaggagctctttacctcacttggcgctggcgaccaccgtgtccggctgccagccaccgcccaacgctttgtagatcgcgacgatgccgcgatacaggtccacttcggcctgggcctgggagtcttcggcggccaggcgctcacgttgcgcgtccagcagcaccaggaagtccacggtgccttcgcggtagcggatcgcggccaggtcggcggcggcacggctggattcgctttggcggatcagcgaaaccaggcgttgctgacgcttgccgtagtcactgaaggcgttctcggactcttccaacgccagcagcacttgctgctcgtaggtcgccagggcgccatccgcttcggcatcggcgccgcgcaaacgggcgcgcacgctgcccaggtcgaaggcggcccaggtgatgctcgggccgagggcccaggcattcgcggcggacgagccgatctgggaaccgcgcccggcggtaaagccgaggaagccgctgaggctgacccgtgggaacaggtcggccttggccacgccgatacgcgcagtggcggcggccagtttgcgttcggcgctgaggatgtccgggcgacgttgcagcagttgcccggggtcgccaatcggcaaggccttggcaattgccggcaagtctttggggctcaggtcgacgctgagcttgtcggggcgctggccgaggagggtagcgatacggttacgctcgcgcacttgttcggcttgcagttgcggcacgctggcttcaaccgctgcgaggcgtgcgtcggcacgctccacgtcgagttgatcgcccacaccggcatcgcgcaggctgacggtgatggtgcgcgattcctgctggttcttcaggttgtccagggcgatgcgttcacgcagttgcgcgccacgcaattggccgtaggcgtccaccagttcggcgatcattgtcacttgcagctggtacaagtccgcctcggcagcctgctggtcagcgtcggtggcttccagattgcgctggatgcgaccgaacaggtccagttcccaggccatgtccaggcctaggtcgtaacgctcggtcttgacccggctggtggtctggcccggaatctggcctttgccctgatcactgctgactcggctggtgatggtcggcatcgcgtcgttgctggcgtcatcacggatcgcccgcgccgcccgcaggcgggcaaaggcgacgcgcaggtcacggttgccttgcagcgattgcgtcaccaactggttgagggtcgggtcgtcgaactgctgccaccagatgccttcgaacttggcatggtcatattgcttggcatcggcagcggccgtgatgttggccgcctccggggtctgggtcttgtagtcggggcctacggcacaggcgctcagcgccagtaccagcaagctcggcaggaatactttcacactcattgctgtgtctccagcttcaaggccttggccgctttgcgtgcctcgctgcgctccaccgagcgacggatcagtacgtagaacactggcgtcagcaacagaccgaagaaggtcacaccgatcatcccggagaacaccgccacgcccatggcatgccgcatctcggcaccggcgccgctggacaacaccagtggcactacacccatgatgaaggcgaacgaagtcatcaggatcggccgcagacgcagacggcaggcttccagcaccgcagcgagcgggtcgaggccttctgcctgtttgtccttggcgaactcgacgatgaggatcgcgttcttgcacgccaggcccaccagtacgatcaagccgatctgggtgaagatgttgttgtcaccgcccgagataatcaccccggtaatcgccgacagcagggtcatcggtacgatcaggatcaccgccaacggcaggctccagctttcgtattgggcggccagtaccaggaacgccagcagtacgcagagcgggaacacgaacagcgcagtgttgcccgagaggatttgctgatacgtcaggtcggtccactcgtaggtcatgccgttgggcagttcgtctttcagcagtttctcgatcgccgcctgagcctggcccgagctgtagcccggagcagcgttgccgttgatttcagcagtgataaagccgttgtagtgcatcacgcggtccgggcccgaggtgtcgctgaccttgatgaaggtcgccagcgggatcatctcgcctttgttgttgcgcactttcagctgaccgatctggtcttcatccaggcggaactgttgctcggcctgcacgttgacctggtaggtccggccaaagcggttgaagtcgttggcatacaacgaacccaggtagatctgcagggtatcgaagatgtcgctgatcgccacgccgtgggtcttggccttttcacggtcgatggcggcatcgacctggggcacgttgaccgtgtagctggtgaacaggccgaacagttccggcgtggtacggctcttggtgatgatgttctgcacttctttgtacagctcgtcgtaccccaggttgccccggtcttcgatctgcaggcggaagccgccgatcgtacccaggccctgtaccggcggcggtgggaagatcgccatgtaggcttcctggatgctgctgtacttgccgttcaaggcaccggcaatcgcgccggcggacatgctcgggtctttacgctcgtcgaacggtttcaaggtcacgaacacgatgccgctgttcgggctgttggtgaaaccgttgatcgacaggcccgggaacgccacggcggcttccacacctggttgtttcagggcgatgtcggacatgcgcttgatcacgtcttcggtgcggtccaggctcgccgcgtccggcaattgagcgaaggctaccaggtattgcttgtcctgggccggtacgaaaccggtcggcgtgtgggcaaagcccagccaggtcaggaccatcaggccggcgtacaggaacagcgcaataccactgccacggatcacccggcgcacggtgccgacgtaaccatggctggccttgtcgaagaagcggttgaacggtttgaacaaccagccacccagcagcttgtcgaggaacttggagaagccatccttcggcgcgttgtggcttttgagcagcaccgccgccagggcaggggacaaggttagggagttgaaggccgaaatcaccgtcgagatcgcaatggtcaaggcgaactgcttgtagaactgcccggtcaagccgctgatgaacgcagctggcacgaacaccgcacacagcaccaacgcggtggcgatgatcgggccggtcacttcgctcatggctttttcagtggccgggaaggggtccaggcccagctcgatgttccgttcgacgttttccaccaccacgatggcgtcatccaccacgataccgatggccaataccaggccgaacaacgacagcgcgttgagcgagaaaccgaacaggtgcattaccgcaaacgtaccgatcaacgataccggcaccgccaccaacggaatgatcgaggcgcgccaggtctgcaggaacaggatcaccaccagcacaaccaggatcagcgcttcgaacagggtgtgtaccaccgcttcgatggagccgcgcacgaagatggtcgggtcatagacgatgctgtagtccatgccttgcgggaagctctttttcagctcttccatcttgccgcgcacttcgttggagatctcgatggcgttggagccagggcgctggaagatcgggatggccacggccggctggttgttgagcaacgagcgcagggcgtattggctggaacccagctccacccgagcgatgtctttcaaacgcgtgatttcaccgttggcgccggagcgaatgatgatgttctcgaactcttcctcggtcaccaggcgaccctgggtgttcaccgacaactggaacgcggtggcggtcggggcgggttgcgcacccagtgcaccggcggccacttgacggttctgctcgcggatcgcggtcaccacatcagtggcggtcaggttgcgcgaagcggttttgttcgggtccagccatacgcgcagggagtagtcgcccatgccgaacagctgcacatcacccacaccgccgaggcgcgccaactcatccttcacgttgagcaaggcgtagttggacaggtagagcatgtcgtagcgctgatccggggaggtcaagtgcaccaccatggtcaggtcgggggaggccttgtccacggtaataccgatgcgcgtcacttcttcaggcagtttcggctgagtccgggtcacacggttttgcacttgcacctgcgcgttgtccaggtcggtgcccagggcgaaggtgatggtcagggtcagcttgccgtcggcggtcgactgcgaggacatgtacagcatgttctcgacgccggtgatcgcctgctccagaggagcggccacggtttcaccgatgaccttggggttggcgcccgggaagttggcgcgcaccaccacggtcggcggcaccacttccgggtattcactgatcggcaattggaacagcgagatcgcaccggcgatcaggatcagcagcgagagcaccgctgcgaagatcggccgcgaaatgaagaacttggaaaaattcatcttgagtcgtttcccttaaccgcgtggagccgcgacggctgcgagcttgggcgcggttttttccggcgccacttgctccaggttgctggcttcaagcgcttgtcgttgttgggccaaggcggcgagggtttccttgctggccatcggaatggtttccggggcgaccggcgaccctgggcgcacgcgctgcaggcccttgacgataatggtgtcgtccttgttcaggccgctgcgcacgatgcgcaaaccttcgatcttcggccccagttccaccgagcggtaggccggcttgtcgccttccatcaccagcacgaacttcttgcccaggtcggtgccgacggcttcgtcgttgatcagcacggcagagtaggtgccgctgccgaccagcttcagccgggcgtacaggccaggggtgtattcgcccttgctgttatcgaacacggcgcggccacggatggtgccggtggccgggttgacctggttgtcgacaaagttcatctggcccaggtgcgggttgccggtctcgttggacaggcccaggtaaaccggggtggtcgcaccacgacggccttggcgggccagttcggtgtacttgaggaacacgcgctcatcggcgtcgaagtaggcgtagaccttgtcggtggacaccacgctggtcagtgcggtgacatcggcggtgaccaggttgccggcggtgatttcggcacggctgacgcggccgctgatcggcgacgtcacgcgggtgaagctcaggttcagcttggccaggtccaactgcgcctggatcccggcgacggcggcgcgggcttcctgggcggcggtggtgcgcgagtcggccagttcggcggagatcgcattgctctggcgcaggcgttcgccacgttgcgcttcattatcgctgcgggtcgcggcggcacgggtttgttgcagttgggcttcaaggcgacgcacttcggcctggaacggacgcgggtcgatctggaacagcaggtcgcctttctttaccaaggcaccttcggtgaaggccacttggtcgatctggccggacacgcgaggacggatctgcacggtttccggggcttccaggcgaccggtgaattcatcccactcgttgaccggttgttccagcaccttggccacgctgactttggcagctggcatggcggccgcttgttccggggttttgccgcacgcgctcaacaccactaccgccaaaatggccaaggggaagcgcaaatgtttgagtgactgttccatgaggtgcatccgccaatgtatttgagatgggcggatcatgcgcggcgctgtgctatgtcacgaatcgaatgaagcaaaggtaactatcattcggaatgatataagcgcgagattagccctctagcatgggggtttcgttagtgggctatcaataggcgtgatgacaattgtcttttgcaggccgtgcaactcaccggcgtagcgttttgagtgcgtccaactgtgttgatcaagcggattgcggcccaattgtcgagccatgatgcgcaggtggtctcagggtggtattggacgctggagggcagggtgcttgtgatgcagtgtgcgaccacggcagaattcagcggctgcgccatcgcaagaccgcgcattcaatgttgttgcaatctgaccaggaagtcgttgatgaccacgttccagaaccatgactgtcataccgttgcaacgctcggcggcgagttggcagcctttctttccaagaccctcggtgacatttgcgaacggatgacccggactcgcgcacagatcagtgagatcgatgctctggaactgcgtgatggtgacgcagaacgagatgcggcgttgttgaagacccggttgcgcatggaggacagccagcgtcgttacaatgcgcacaaaaaagagggctacggactgggatgggtgctgagccccttcgataccggagaggccaatagccaattcaaaaacgccgtggccaggcatgcagcggtcacccgtgactatgatgagcccaacgccaaggtgcagcgtgacagcgatatagcttcacacaatcagttcgtcaccgataagcgcaaagaacaagctgagctgaaggtcaagctgcagaaactcactcacgttcatcaagaactgaatggttttctccacgaggcgaacgaagccttggctgccgcgtgcggtcaaggttggttggcagccgatttcgccatgcacctcgccgggatggacagggcgatacgtcaaggcaatgtgtcgctggctcgcgggcatctgacgcaattagtctttcagaaacgcccggatgacgccctctactcccgtttgcacaaccaggccctggagctgcgcaagcacgcctattccgcccattacggggtgcctgtcacgggctgtttcgccgatatcgttgacgcctccgtccagttggcagccgccaatctgacggcagattgtgcaagtcaattgctaggcgacctgcacagctcggatcaatggcaattgttgaccacgttggtcgcgtcgcctcaaaacctgcgcattgatgtgctgtggtccatctattgggggatgttccgctgccaacagaaaatggcggatgtgctcaaccgtacggtgtcaaccgaagaccccctgaatggccggttcagtcagtgtgttgaagatgggctttcggagtgggcgtccagccatattccgctattcggctatcctgtgtcccagtcttatctgggtatgttgcagttggccaatactgaagaagaaacccgtgtgggcgccgatatcggcgtgattatcgccctgaatattggtgggctggtctgtcgcaaagcagtgttgttgcaagccaagcgcgcaaaagactgggaggctgacgtaggcagcaagaagggccaattacccaagctttccaagttgccacgcggcgggtattacctgttctatcacgaatcgccccaactgcggttggactcgccggttccaacagtgagttcagcgcaggcgctgcagcagttgatactcgatgcaaacagaaacccgaatgcgaccaagcttaagctggatgttcgcagcacgggttgggactgggccagcttcatcagctttggtctgtgtgatgcagcctccggcattggagagccctttgacaccgttgatgacgccatgcggattctaggcagtggtgagaccggagagcttcctcggcacctgttactgctggcgattgaagacgagcccttcacgcttgaactgacgaagcgcttgcgtaatcaataccagcgggcggagccccaacaggacagatcaatgagcaaaacctcaaaaaaggactacggcagggagggcgctgacttcgagctgtgatggttcgagcaggccatggcgaaggggctgccaggtcgatcaccaaatctttaatcatagcggctgagcgtttcagcccgaacgtaggtgccaaacacgtgatcccataacggtgaagagacaccaaagttcttctcgataccttggcggtggtgcagctcatgattggccaccaggcctggaatgaagcgatacgcccaatgctcggggcgatgcatcacgtaatgtaccgagatgtaatagaagtacccgctcacggcgccaacaaatgtcgacgtcaatccggtgaaccaggccagcagcaacagcgcggcaaaggtcgagctagttttccagctcgacacaccgatataggccagcacgtcgacgtggtgggtccagtgctcacggcgatacagcgagtgaaacaggaagcggtgcgccgagtactccaccagtgaccaggccaacaggcctgcgagtgccagtcccggatcaaaaggtgcgaggtacagggcaaggaggatgaagagggggacggtgaagaagtcgaggtaataagcgactgacgacatcagccatttattggaagcagccatgcgcggaatatccctgtagtgcccgacggtcgggggcgcgattctcggggatcgcgccgtcgccgacaactgtttcgcgcggcactgcgacacaggtctcacgctgcgcttgcaatgacctgccggccagggatagccgcaatcaattcccgcgtgtactcactggccggccgatggaagatctgctccaccgagccctgttcaatcacccggccgttgcgcaacaccagcgcctcatgggcgaagttggccaccaccgacaagtcgtgggacaccagcacataggcaatgcccatctcccgttgcagctcttccagcagctcaaggatgcgcgcctgcaccgacacatcgagcgcgctgaccggctcgtcgagtaacaacaagtcaggttgcaacgccagcgccctggcgatggcgacgcgttggcactgaccgccagacaactctcgcggtaaacgatccaggtagctgaccggcaaatgcacgcggctgatcaactgccgcgccgcgtgctccagcgcggcgcccttgagccgcccgaaggacaccagcggttcgacgatgctgtcgaacacggtaaagcgtgggtccagggcggcaaacggattctgctgcaccagttgcaggcgttggcgcagcgggcggaagtcgcgccagctcaggtgggtgacgtcctgttgttcgaaccagacctggccctgggtcggtttttccaggccgagggcgatgcgcagcgcggtgctcttgcccgagccggactcaccgacgatggccagggtctggccgggatacacctgcaggctgagatcctcaagggccacgaacgttgattcttcacccttgaccctgggcattacaaacgtcttgccgacgtttttcaggctcaggatcggttgttgtgtcgaatccatgcgcggcaagggttcacgccgtctggcgaacgccggcgcggcggcaatcagcgcgcgggtgtagtcgtgttgcggcgcgccgaggatctggcctggcgcgccttgttcgaccacttcaccgtgttgcatcaccaggatccggtcggcgcggtcggcggccacgcccaggtcatgggtgatgatcagcagcgaaatcccgcgctcgctgaccaagcgttgcaagtggtcgaggatcttgcgctgcaccgttacatccagggcgctggtgggttcgtcggcgatgatcaagcgcgggttgcccgccagggcgatggcgatcagcacacgctggcgcatgccgccggagagttcatgggggtactggcgggcgcgcagtacaggcttgtcgatgcccacctgttgcagcagttcgacaatgtcggcatcgacgccggggtagcgtttgcccttggccaggatcagcgcctcggcgatctgctggcccacgcgcagggtcgggttgaggctgaccatcgggtcctggggcaccaggccgatggtgcggccgcgcaatgcacgcttttggcgctcactggcgtgggtcaggtcgtggccgtctacccacagctggccggcggtgacctgcgcactgtccggtaacagaccgaggatagcgttggccagggtcgatttaccggagccggactcaccgacaatcgccacggtctcgccctgggcgatgctcagtgacaggcgattgaccgccgtgttgccgtgccgatagctgacgctgagttggcgtacatccactaaagcgctcatcgctggatctcctcgaaggtgcgggcgatatggttgaggctgaacaccacggccaccaggaacaggccgggcagcagggaaacccagggagcggtgatcaggaagtgtcgcccgttggcgatcaaggtgccccattccgcagccggtggtgcggcgccgaaaccgaggaagctcagcccggcggtggccaggatcgcggcgccgaagtccagggtcgccagcacggccaccggcccccatgcattgggcaggatgtgccgcagcaaggtgcgcccccagctggcaccgcccaggcgcgcggcctcgacgtagggcagggtcttgacccgcagcacctcggcgcgggtggtgcgggcaaaccccggaataatgccaatgcccacggcaatcgccaccggcaccgtgccgaagccgatggccgtgacaatcgccagggccagcagcaggccgggcagggccagcagtacatcgacaaagcgcatgatcaccgcgtcgatgcgccccccggcaaaacccgacaggatgcccaggcccagcccgcccaagagggcgatgcccaccgcaagaaacgctgccaggaccgataggctggcgccatggaccacccgcgtatagaggtcgcggcccagctcatcggtaccaaaccagtggatcaggttgggcgcgcgcagcttgtcgacgggcgaggtggcgtaaggatcgaagctgctcaacacgtgcggcgccacagccgccaccaaggcaaacaccaccaccagcagcgccaggctgaaccccggtcggcgtaacagtggcaacactgtcgccgtcacgcgttgcaggcggctgcggcggcgccacagcgcagggctggccgggagggtattgcggcccaggttctgctcaagaacggtcatggtctaggacacctttggcgtgtgggagatgcgcgggtcgaaccacgggtacaacaggtcgaccagcaggttcaccaatacaaatgccgccgccgacaccgaaacgatggcgagcaccactggaatgtcctggcgcagcactgcttcttgggccagccggccaatgccggagcgggcaaagatggtttccaccaacaccgcgcccgacaccgtattgcccacctgcaagccgatcagggtgaggatcggcagcgcggcattcttgaagccatggcgtgcctgcacctggccacggctcaggcccttggcgtacgcagtggtgatataggactctgtccagaccccctggaaactgcgttgcagcacctgggcgtacaccgctgcactcggaatcgccaaggtcacggcgggcaacaccaggctttccaggccccggctgccggtggccgggaaccagccgaggccgaaggcaaacacctggatcagcagcagccccatccagaacaccggcaccgaaaaccccaatgacggcagccgtgccaaggctttcttcagcggttgccaacggatgtaggcggtcaggtaggccaggccgattccgccaagcagtgacaacacgatggccagccccgccagggacagggtctgcggcaggcgttcggcaagcagttcggccactgggcgattcagtgaaagcgactgcccgaaatccccccgtagcgctcccagcagcaggtcgaaatactgctcgaacaggcctttatccaggccgtagtaggcccgtgccttggccaggtcctccgcggacagcgcgtcggcctccatgcctgacgcgctgagcatgatcgacaaggtgtcgcccggcagcagatacagaatgaaatacgtgatgctgtacgccccccacagcaccagcagtgcctggccgatacggccgatcagataacggctcatggcgtgccgatctcaatatcacccagcagcgcaaaaccctcggcggtccagcggaagttttttaccttgggcgaggtcgccgcctgccacacacgctcatacaccgggaacgcggagctttcatcgataagtaaatcctgcaggctgccataggcggcagcgcgttgcggggcttgagtggccgtgatgccggcatcgaacaagcccttggcctgttccagcaccgccggttcataggtgttggtggccagcgtggaactgttggcgctgcgcggatcgaggatggtctgcaggatgatcgggtcggcgcgggtcatgtagttgatggtcaggtcatagttgcccgccgagttgttggcgacccattcggcgcgggtcactacgctgagtttcaactcgatgccgaccttgcgcagttggtcctggatcagcacatcgccggcggtctcggccggggtgatgttgtagctcaggctcaggcgcttgccgttcttctgccggtaaccgtccgcacccttggcccagccggcttgatccaacaaccgctcggcgtccgccgggtcataggccagcttggcgccctggcttttgaagtacggcgtggtcacatcgaagatgccgtccaccaccgggaactcggcgttgtacacggtgctggcgtagctcttgcggtccagggccttttgcagcgccaggcgtacttgccgatcggccaggatccgctcgccacgggtgttggggtacaggttcagcgccggtcccggcagcgagcggctttgaatggtcgcgcccttggactggaacagcttcaggtcgacttccgagaacgggttgcgcggccacaggatgtcggccttgccttgcaggaacaggccgttgcgcacgctttcttcggggatgtagctgatgtccaccgcgtccaggtgcgcttcaccctggtttttcatattggccgaggcccaggcgtagcccttgcgcttggtcaggtgcgcaccgacttccggcgtgtagctggccagtacgaacggcccggtgccgatgatcttgcccagggagcgctccttcacgctcagcgcgtaggaggccggcgcgaggatcgccaggttggtggtggaggtggcttgcaggaagcccgcgttgggcttggccagcaccagcttgacggtgaagtcgtcgaccacttcggcgtggtcataacccgccaggtaggtggcgccgaaggtggccggcagttcggtggccagtgccttgtcgctgtcaaacgcggttttcaccgccttggcatcgaagcgttcgccgttgctgaaggtcacgtcctcccgcaggtggaaggtataggtcagcgcgtcgtcactgacttcccagcgtttggccagccagggaatgatcttgccggtgtccgggtcctggtcggtcagggactcggcgacgttgcgcagcagcacgcggtgctccagccaatagacctggaacgggtcgacgctgaccagggtggtgttatcgccgaaaaatgcgatgttcagggtcttgcccgcctgtggggcatgcccgggcgagcaggcggcgaggctcagcgccagggcgcagggggccagcagacggctcatcaagttggcggtattcaatggggtgccctcatgtggcgtgtggatcagaagtcgtaggcgagcttggtgtaccagtagccaccgcctgggtagaacggcgggttgccgtaggcggccaggccgaggttgctgtacaccgcgtttttgtcggggcgcacgtcgaagatgttggtgccgccgatgctcacggtgaggtggtcgatgaaggtgtagctgacgtccaggtcggtgatccatttggcgccgaagctgcggtcgccggtggggttgacggccagggtcttgaccgcgccgtagcgcgcggtttgcaggttgacggccaggtcctcgaccttccagttggcgcccaggatccacttggtcttgggtgacgcgtcggtcaggtcgccttcgcggtcgcggccgaccagggtcacgccggaaccggccagtgccgccggtgtgtcgcgtgtgccttcaatcgtggtcttgttccagttgaagcccaggctccagcgcacatcgccccaggcctccagcggtgtggtgtggtcggcgaccacgtccaggcccttggtgcgcgtgtcgaaggcgttggtgtagtagttgacccaggtgccggtcggtacaccctgggcggcgagaatggcgttgatcgcgccgttgccacggtcgtagatattgctggtgagggcgatgcggtcatcgatgtcgatcaggtaggcatccgcggtgatgctggtgcgcggcgccggttgccaggtcaggcccagccccaggttgcgcgatttttccggttttaggtcatcgccgcccagcgccttggccaggttgctgccggacggcgtcaggcgcgtcacggccggcaccacgttgccgttcacatcgacggccacgcggttgtcggccacggtgtagccgatctgggtcagggaaggcgcgcggaaaccggtgcccagggtaccgcgcacggctacggtgtcggtgagttcgtagcgtgagttcactttcaggccgaaggtgttgcccgaatcatcgtcgtagtgctcgacccgcccggcgacgtcgagaaaccagcggtccgtcaggtcgaaacccaggtccaggtagccggcgtagttattgcggatcaggctgacttcatcttccggacgaatcgtcaccgccgcctgtgcgccagacgcggcagggtaggtaccggtgatataggcctcgcgctcgccggcgaacgtactgaaatgctcccagcgatgttccaggcctgcggatacctgcaccggcggcgtcaggttgaacaggctgtcgtagcggcgggtgaagtcgaggttgttgacccactgctcgaagcggaaggtcgccaggttatcgaacctggtcggcgacgcggtgcccagcgacgggttgatattcaggtcgctggagtggtgcacgttgttgcgcccgtaggtggtgctcaggtcccagttccagtcggccaccaggcccttgccgccgaacagcaactggtagtcgcggtccttgatgttgttgagtgggaagtaaccgtcgggaaacacctcgggcactgcggcggtgccggtcggcaggcggaagtagttggcggcctcggcgtcgcgttcgccgtaggtggagaacgaatatagtgtcaggtcttccagcggcagttcggcgttgtaggccaggttgaaggccttgaggtccgggtcgccgttcttgatcgccacgcggtcccaggccgcttccttggccgggtcggcaaacgcccgcacgctgctgtcggccttgtcgttccacgacgcgctgccacgtttgcgcgcatcggccgagaagtgaaagaagccgccctggcccagttcgaagccctggtcacccgcgaccttgatggtctcgccctggccggaatacaactgaccgtagctggtctccaggtggccgccgcttttcccggacttgaggatgatgttgatcacgcctgcgactgcatcggaaccgtactgtgcagccgcgctgtctttgagcacctcgatatggtccaccgcgctgaccgggatcaggtcgatgtccaccgcattcgcaccgctgttatcgatggaaccgcgctggccggtggcgccgttatgccggcgtttaccgttgaccagcaccagggtgtaggccggtcccaggctgcggttgctcagcgggcgcgtcaccgagttgtagccggcgatgttggtgccgaagttgaaagaaggcagcagcttggcaatcgcctcggacaactcggcgcgcccggtcttgagcaattggtcgctgttgatcacatcgatcggcgccgggctgtcggccactgtgcgttgctggccacgcaggccggtggaaatcacggtgacggtatcgagcgtggcatcgtcggcgaaggcgggcgcagcggccaggagcagggagccggtcagcagcgaaagaggcaacttcttgagggacgtggggagtgcgatgtctggcatggagataacctggagggtgggggtgcgtcctccgccaggtatggggtcggtctgtgaagtgaagatatctctataaaaaacggtcgggaaagtcttttttggaataagctaattatcagttaatattatttatatctaaaataagattaactatttttattatgaaaaacaggcgtgctgcttatcgcccatgtcgactacattccaaggggtgcttggcggctatcgcgactattggactccaggcccatcactgccgcctggcatacagaagaatttggcgcgaggcaaacctctacctcatttatgaggtgctcgagggggctttcgattagggcgccgaagcctgacggtgggggcaccgcaccggcgcactcggatgatgactcaggctcgacgctttccagccatcaggcctgcaccgcagggcctttcaactcgatctgattatcatcagggtcattgagatacatcgacaacccggttccctccgcgccataccgcatcacggccgcttcagcggataccccggccgccgccaggtgctggagaatggcctgttcatcgaacggctcgacccgcaggcaaacgtgatcgacattgtgtctttgcttgcccgccggctgcccaccctgacgcccgatcggtccgttcacatcaaccaggtcaatcatggatgtgccagcactcaggtgaatcatgccgaggtcatcacggcgttttttgacatcacaccccagcacggatgtgtagaacgccaggctgcgctcaatgtccttgacccgcaaaacaacatgatcgatacgttgaagggtaaaactgcgcatttccatcactcctgatgcttgccgttgtcgaatgggacattgttcagggtagccgcagtttgagtgcactcaaggctggcagggtcgaaggccggatattcaaatggccgcaataggctagaggcagataacatgaaagagtggtcgtcgctgcgcaagtcgaaggtggggggtgtcgttgatctacgggaacaacgcgtgctcgccatggacgacggcgcgtacaagatttcagataatcaatattttttagctgacgcctgttctgttgagggagaggaaaaactgagtttgctatccctctactgggccagcagtgaggctgcatttcgaagggcctactacagggatgttgaaaatgatgacctggctgtatgccaaccgccggctgaattacttccagctggggcgggtgcgacctaccgtcagataaaagaggcgcttggcgctcttggttctgacaggttaatggagtacgcctcttatcgtgttatgtctgacggtgcatttgttcataagggcttggaaagcgcatcggctgtttattattttcggtcgcatgacattgctcatgatgagatgccttacgcgatactgtggaagcttttcagtgtttgattaatgaacgtcagggccctgcggtcaggttgaagtggtcgtacgcgactcccgaaagtcgacatttgcagtccccggttggtgtttcaacgaaggtgtatgcagagcagtatgtcggccctgggattgctacggcagtgccattgctgcactctcactgctcatttttgtacggggtaacgcatggactggagtgatgtgcgggtctttctcgcgattgcccgtagcgggtcgttgggcgctgccgccaagcagttgggtgtcagccatccgaccgtagggcgacgcttgcaggtgcttgagcagtccagtggccagcccattttcctgcgtaccacccaaggtctggtcctgaccgacagcggggaaaagctgctcagtctggcgcaggaaatggaacaaagtgccttggcaatcgaaaggcgccttgcgggggacagcgcacagccagaaggtgtgttgcgcatttcttgcgccgactggttcgcctgttatgtgctggccccggtcctgaacgaactggggcgacgttatccgctgatcgtgcccgaggtcatcgcagggcatcgattgtttgacctggctcgtcgcgacgccgacattgcctttcggatcgttcctttcactgaacccgatattgtccaccgcaaactgactaccttgagctacgggttatacgcggccgtcggatccgctgaccccgagccgcagggcgacggggtgggtttgatcaccatgagtgttgcccagtctcactatcccgatgtgcaatggctgcagcagcgttaccctctggcccgtaaggtgttcaccagtagcagccgcacagcccaggcgcacatgtgcgcgcaagggcagggtgtcgccgtattgccccgcgtcctgggcgaccagttgacggcgctgcggctgattgatccgcatgaaccgccaccgggtcgcgacatctggatgggttaccaccaggacatgcggcagatggacagtcttcgtgcccttgccgaccttgcctcgggcatgattggctcgcagcagggccgatgattcactctactgggcgcagggctgccgtttgcaattgcacagccggttggcgcgccaggcttaggctgagtcccgcgcccaaggccaggcatgccgcgatgcagagtatggaaacggtgaaggcgtgagtgatggcggccgcgtccgtatccgtgcccagaagggtgtagaaaatgccgcctattatcgccacgctcagtgatgtgctgatttgcagggtagaactggcaatgcccgcaatcatgccggaatacgcgggcgccacgcgtcctgtgatcattcgcatcaatgtcggcagggccagtccttgtccgaaaccgatcagaaacagaatgacggcgaggggctgcgcagggggcgtgacggccatcggtgtgtgcgccacgagccaggccaggagcacgaaccccagcacctcaagccccattccgacggggttcacgtaagcccccaggaaacgcctgaattgaggggtggaaagcgggccgagcaaaaatcccgcgccaaaaggaaggaagatcaggcctgcattgagtgggctcgtatgcagcgctccctgtaaatacatggaaaacagcaggaaaaacacgccgatcgcgtagaaggtcagggcaacgagcagtgcccggcccaacccaggcgtgcgcagcgcggcaggatcaagcaacggtgcgccttgcgcctggtgcaaacgggcttcgtagcgccagaacagccagcccaacagcggtactgccgcaagcgacagccaggcccacaagggccagccggcttcacgcccttcgatcaatggaacgatcagcgccccaagggtcgccatggacaggacggttccacccagatccagcttgcttgtctgttgcgcgcgggtttccctgaccacggcaatggcgatcagaatgaccagcaacgcaatcggtagattaaccagaaatatcgcccgccaccccaagcccatcaagtcgagcgatatcaatatcccgccaagtgcctggccggctaccgacgccagtccaaagaccgcgccatagagactcagcgccaagggcttttcggactcgggaaatatagcctgcgcagaagcgagtgcctggggcgccatgacggctgccgtcacgccttgcagcgaacgtccggcgatcaacacccaaggtgactcggcgacgccgcagatcagtgaggcaactgcgaaaccaaccagcccaaggaaaaacattctcatgcgaccgtagatatcacccagccgtccgccggtaatcagtgtcacggcataaagcgccgcgtatgaggaaatgatcaactgttcggcggaggaggccgtgccgagcgattgctggatcgagggcagcgccacgttcacgatgaaaaaatccagcggcggtaaaaacgcaccgaccaataagatggcgaacatcaaccagcgccgcggttccggtaggacgttttttgtctgtggcataaggtctcctgcctggaacccttcggttccagaatattcacgatggcgggtcatgctccgaatcaatggggcccaatctaaacgatcaaacttgggctgacgcctcacaaaattgaacgcccagcgttcatttatggcagtgccgtcgagtgcctgattcctctcaaaatggccgcactgtggttccagtcggtccacacaaacgagactgaggagtcagatatgtcaggtaaattcgctggtcaggtggcagtggtcaccggcgcatccaccgggatcgggtatgcgattgcgcagggtttgattgcagagggcgccaggcgtgtttacatcactgggcgttctgcagccacgctggaggctgcggtggccaggcttggcgatagagcgatcgcggttatttccgatgtcgcgcgccaggctgatctcgatcagctcaaggcgacgattgaggcccgcaacgatcagttggacgcagtgttcgccaacgcgggtatttgcgaaaagaacccgctgggcgagaccaccgaggcggcgtacttcaacctcttcgacattaacgtgaagggcgtgttttttactgtgcagacgttgatgcctttgttgaaaaacggcgcttcgattgtgctgacggcttctatctgctccagcaatgggatggaaggactgagcctctacaacgcatccaaggctgcagtgcggtccttcgccaggacctgggccaacgaactcaaaggccgcaagatccgaacgaatgtcctgagccctggcttcacccgcacccctttgatggacaacggcttgaagatgagcgaaagcgacattgccgcgctgcgccaccatgtcgagcagatcactccgctggggtacatggcccaacctgaagaaatcgcctcgtcagcgctgttcctcgcatccgccgatgcgaaatatgtcaacggggtggaactgatggtcgacggcgggctgtcgcagatctgacctcccgatcgaacctggtgcaacccttgcagagggttgcttttgtcgcttttgcgaagcccccgcaggacacctcaacatgaacagtgaagaattgaacacccgactggacgccctggaggtcgcgccgccatcgagtcgctgatcagcgcctacgccaatgccttcgatcgcatcgacgtgtcgctcctgagcggaatctggcacgaagagtcgacattggatctgccgggtttcggctcagccggaaatcgtcatgaaatcctggcgatggcgcaaaacagctggcgccagatgccacaaatgcaccactggatggcctacccgatgatcgaaatcaagggtgacagcgcggaggggatggtggctgccgattgcctgttccacgacactgaaaaagggccggtccaagtcagcgggttgtatcacgacaggtttgaacgtcggaacggaaaatggacgttcctgtcacgtcgttttgaactgcatttcctgacaccgttgaacggctgggtacccgtagcgggtgaggagaggtttgcaccaagcgaagatcagaacatgagtaaactcagagaaggttgatttgcggaatgttcaggatgtgacaatcaacttaacgagccaaaatttgccgctgattcggttttgaactcaggggatccagacaagctgcggcgcactgggttagtcggtcatgcaatgttattaaaggttttttttgaagcttgatggggacttcgattacaaactgtcggggtcgccaaaaaacattttgactgggctctagaacagtagtttcagcttggaaaaatagagttatgcccccagttatgcccccaattgcacagggtgtgcgagtgatcgcaaatggcgatctccgacggacttcgctattcctggccagttaagccgttgggccaggtcgctgatcagtcgttaggcaagtgcaactgcacttccatggcgtcatgaaggagtctgacgacatcgatcacgtcgtcgtttgtcacacgatagaacacgatatggcgtgggcttttgaccgttccatgggtttgtttggcctgctggcgtgaatagatgaggtgatagctgcgaaggcccggtgcaagttcatcgcggtcgtggctgccaatgcgataaggcgtgtgggcaagcgcttgcagcgccgcgaggatcagcgcctggtagcgctggcgtgcttgatcgccgaactgcgtctgggagagcctaaggatgtcgacaatgtcggcacgagccgggttggagatccgatactgcggcatgctcagtgtttctctctcgcagggagggttgcctccaggctcaagctctcgaggtagtgctccagatcaccctcgttcacctgagtaaagcgcccgtgctcaagatccatgatgccgatcgaggtcgcctgacgcagtgcctcaattttggcggtgtcttcggcgacgcgctgctccaataaacgtaaaccttctcgcatcacttcgctggcattctgataacggccggactgcaccaagtcatggataacctggtcctggtgaggggtgagcacaacatttcgcgtcgccataactagctccagttctatgcaaacagatacttttgatgttggcatattatgccaatttcgctctggagaatagcttggggccgacatccggcgatcaggtgacggctgacttggcgccaatcagcaaggttcaaagtcatcctcccataatgaaagcaaccggcagattgatttgaagattgatatgcctgactgtgcgtgggaggaggcgcgcgatgtgtgcttctcgatccgccctgaaatcgatcggcatgttcgatgcccatcaatatttgcgtttagaggcaccaagagaggttccaatgccctacgagttagaaaatcgcctagtgatcggcgtcgcttccagcgctgtgtttgatttgctggcatcggacgcagtgtttcagagtcagggggaggaggaataccgcaagtttcagcaaaacaatctgcacgtcccgcttcctaaggggatagcgttccccttcatcaagcgtttactgtcagtgaatgacctgagcgtcgatcctacggatccgctcgtcgaggtgatacttctttcgcgcaatgatcccgacactgggctgcgcgtactgaagactatcgagcattatgggcttgggatgacaagggcgattttcatgcagggaaaatctccttatgaatacataccagcactgaatatcgctttatttttgtcgggtgacaaaaaagacgtggaagcggctatcagggccgggtacccggctggccaggttctcgattcgaaatttgaagacgacgagactgataaaaccctacgcatcgcattcgactttgacggcgtgctcgctggcgatgagtccgaaacaatcatgcaggcctctggattgtctgagttccatgcgcacgaagtgaagaacgttatgcagccccataaccctgggccgctgaaggaattcatggtgcggatatccaaaatccagtcggtcgaggagaagcacaaaaagctcaatcctgaatacgaaaaccgcatacgcgtctcgatcgtcacagcccgcaatgctccgtctcatgagcgtgcgatgaatacactcaagagttggggtgtcatggccaatgacgcattcttcctgggtggcatcgagaaaggcaaaattttaggcgtattgaaaccacacatcttcttcgatgaccaatcagggcaccttaaatcgactagcgcagttgctccatccgtgcacattcctttcggcatcaccaaccatgtcgcgacagtggttgcgctagagcctgaagctgatcaggtccagcaggtgatgtaatacggaggattgagcgcgtaatgctaaaggagtccgtataggttcctcgggcagtccgagatcggatggggtaattaggattgctcgcgaacctgcatccagtcgaaaaaatcttcggatgcaaagccaacgctgcagttggcgtcgaaccgctcgttgattctgatgagcgtcatccgcttagcttcttgtggagaggtcgggaagaaagctccaccaggttcgctgtgcatgaagaaatcgccgagctttgctccgcagttttcgcagtgattcatcaggtagcggctgcctgccgttttgctgtaggcctgcctgaacttgttggtgaagtgatggatctgcttcgtgaccaagggagagaggctggcgacgttggagaccgttccgcgatacccattgcacttccattcgccgaggttgcttgtgagcgcgaaatcttcgtcctcatcctcgtagtaatcgaactcttcgtgttgctcgggcagcttgaacgagaacacgcgggtcaaattagagcagccccagcactcggacacggactctatgacgtagtaatacggtgctcttacactaaattcaggtccgtgctccaagtctgcatgcgttgttacggacagccattgagccaagggggcgatgtcgacaccttccgggatgtaccaagtcttcaggcttgggtcccatctggcaccgagtgatttcgcttcatctttttctgagaaggggactttcagatcaatccttgccatttctgtatccgtacgtattgctcatcagtaagcgcagctttaacctgaagcgactatggaatcttgatacctaaagcattcaacgatggcgtatccatccggccattcacggtcagcccactgtccatctgaaaggccatcaacgcaccacgtgtcgtcttgcccatcactccatcaatggcgccttggtaatactggcgcaccatcagcgcggtctgcacacgggtgaccaggttgcttttctgctcattggtcgcgcggctcttagaagtgctcgaacttgtcccgctggtagtgccagacgactgataaaggctgttgctgcttggggtgctgctcgaagcactcggcgcgctgtagcttcgggtgctggtagcgggtgggctgtagtagcgaggtgcgctatagccacccgagccgctgtagtgagaactgtgcgagctgtgggagctatgtgaactgtgcgagcgatgtgccgcatagatgttcacggcgtctggaacattcagcgtatcggcaaataccggtggttgcagcttgtcggcaggctgccagttcgcatcggcgagcgacatattgcccgcctgtgccagggtggtacctgccatcggcagcagggtgatcccactgatcaggactttccagcggtcaagcaatttcactgtgcactccttgcgtaggcgctaaaggcctcggtcgataggtgtcgtacgccgcggctctgccagcggtcggtgtgggatttgaagaagccggagcaatgtttgacggctgcgcattgctggcagctatcgatgaacaggttcttccagtccgagatgctctgccgggcgaaacgcgagaggtgggccgggatcaggcacaggggcaggttgtagatcgaaaccggcactcctcggttgaacaggaaatacacggcctggctcaacgactcctgatagtccagcgggtcaatccacagatcttcgtagtttttcctggccaggccggtgctttcgatacccatcagcgcaacatgccgcacgaaggacaggttcctgaaaacgtagtgggcgagctctggcaagcgtggcgcggtcaggcgattgagcaccacgcgtatctcgatgatctggttggcgcgcgccaggttgtaaagaccttgcagggtttcgctgaacgcgcctggagcctgcaccacatggtcatggtcctcggcattgtcggcatacaagggtatgccccagctcaactgatggtggccgattgcagagagcgctgcgatccagctcgggtcttggaacagacgcccgttgctgagtacatgaatggatttctgtggcaaaacggctttgcacttggccaggatttccagcaggccgtcgcgataaagcgttggttctccaccgctgattcccagattttcttcgcccgggtccatcaggtcgatcagccggaggttctcctcgatgtgccagcggtcatcgatatcttttggcggctgcgagcacatcaggcagaggctgttgcaacggtcggtcatgaacagcaggttgctgtctgagcctcgtcgatagagcactcgcaccaacgcgttgcctggtgtgatggcaatgacatcgccgggctgcacgacatccgcatctttgggggtgtgcaggtgtggccgcgcgctatcgaagttgccgatcaatggctcagggatcaggaatccacccactggtaatgagagcagatgcgggctccgtagccgttcttcgtttggcagccaaagcaacaggtcaccgagcccagcgcttccggcacaaacagccaagcctttttcgatgaactcatccagagtgatgaccttgagcagtttctgctcattaagatgatggatttcgaaatgggtatctttgcgtagcatcgccatcagcccctgtaacccggaaatcgaacatcgttgtaagagcgcctgttcaaccacgacagcagcaccctttggacgttgtcgtcgccatcgcaaagcaggccgaaaagatgcttcagcagccccatgttctttttgcagaagctgctgaacactcggtgtccgatcgggtcagcttggcgggcatagtgttcgatagggtcggcaccacagtacgggacaagtgcgcagtcggagcagcccggcagcgcctctgctacaccactggcgagcaacgcattcataacgggcgatgcgagtaattcagacaagggttggtgtacggtgccgagcctaaagccttcttcacccatctccagcaacattcgggcttcgtccgacggatagacgtaaccgtcatagttgtaaaccagcgccgcagtgcctgcgccagcaggggagcggaggtctacatagccggaggagaagggtgtcaggatattcttcagcaacaggctcgtataactctctgagaggtatacgcccttttggttgatatgcagcaaataggccagtgccttcttgtagaaggccaggtatcgctcaatagggtaatcaagtcgatgggcactcttggtggcaaacccataagggctcagaggccgaagcgagatgctggagaagccctggcttacatactcatcgatgatcgcttcaggctgttcgaggcttcttgaagtcagcgtggtcaacgcggaaactgcatcatggccaaggcgctcacggacccactggatgccttttacagtgcgctcgtaggagtctcgtgacggggtagggcggttggcattgtgcaagggcgccggcccatcgagcgaggtcgaaaactggatgcgatattcttctgcgaagtcgagtatttcctccgtcagatggtgcagtgtggtggtgatgacgaactggatatcccgttgttcgaccacgttccgttcgacgacccattcgacaatctggcggacgcgctcgaaggccagaagcggctcgccaccctgaaactccacagtcaaggcgggagcgttcgattcgaacagacgattgaccgccgcctgtgcatccgcttccgacagatcgtggccggatcctcccagaggggcccgcgacacctggcagtactggcaggtgtggttgcagcgcaatgtaaccacgaacaagtgcagagcagggccctggaagaggaagtccttgcggctgcgatactgcgcagccatttccgggaacgggtcgtggcggcctggttcatagatgaagtggcgggccagcaggtccttgtaaaaaggcgtacttgcttgaacgtcgaagtaactgagggctcgtaattgcgcgtcgttcacgtgcatgtactcaccggtatcggaggtgagcaggatgtcacggtcatgtcccgtgttcatgcgcatgaatcgaaaaggcagcaagcggtagtgcttggcgtctgtcgcaatcagtgtcactgcgaaaccccacatccagcgagagcggctcgggccaggacctcgcgcaatcctactgtttcgcgattgatatggtcgcgtagggcgaagtcgttcagatgctggaggatcagtgagtgagcctgctccggggaaagcgttagccttgcttcagcggggtgggccgtgagacttatctgattggtttcaataccgacctggatcgcgacagtgtcggcaagggaataagcggcgcgttgcaccacgctgagcgggtaggcttcgctgtcgagtttcagcgtgacaggccatgtcatcggaaccgctccttcaaatccgttggaaacgtgtggattttgcaggttgccgaggcattatgccatcataattttttacatttgcacgcatttgtccagcgtggtgggtggtgcgctcactacggctcggccattgatacgaggtagggccgaggcttcgtatctccctcagtccacccattctcatcaatagcctgcttggcgtcaggctgggggcatccttttcaaaccatccaatgcatgccctcagatatgcccccaatgcagcaatccaccggaagtgagtggaactccatggtttgtggaaaggcagaaatgatcagccgaacagcctgccagacgacgtctaaagactctcagggtcgccaaaaaacattttgacttggctctggaacggtcttttaaggtccgaaaaacttttcgatgcccccattttggcccccacggcgaacatctttattgatcagcggtggctgttcgcgagggcgcttggcggccttgagaatccgggtgcgcgaggttgactcgagcagggatagggttgcgcggtgaattcggtctctgccgcgtcttgcgacttgatatcaacatttcaacgccgaaacaaaatcatacatttaattgacgccatcaaatcgccactctaagatcgccgaaaaaaatagtggcacaaggccacttagagggatctagaaatgtggcgttcggtacgtcggaccaggctttgcctgctgttcgcatttttttgcctgagcacggccgggatggcccaaggcgcaaccccgcagaacacgccaggcgtcaccgacctgatccgtgaccgtcaggatcgcctgctcgaagagcaacagcgccgcctcgaagagctcaaggacctgcccggcaaagccgccgccccagccaagctgacagcgcccgccgacactcgctgtttcgccatcaacaccattgaactcagcggcgccgacgcgctgtccgaaggcgagcgcgccagcctaaccaagccctacatcggccaatgtcttggcgtgccgcagctcaatgatctgctcaaggtcatcaccgaccattacttggccaaaggtctggtcaccagtcgcgcctacctgccgcaacaaaacctcggcagtggcaacctcaaggtacaagtggtggaaggccgcttggagggcatgaagggtgcagagggcagcgggatcactgaccgccagctcgccatgacttttccaggccaaaagggtgaattgctcaacctgcgcgaaatcgagcagatggtcgaccaactgaaccgccttccctcaaaccaggcgcagatggaattggcaccgggcaaacaagtcggcggcagcgaggtgttggtcaagaacaccccgcaaaaaccctggcgtgttggtctatctcgccacaacggcggccaacgcagcaccggcgaacaacagtggggcgccagtctcgattgggataacccgctcggcctggctgaccaactctccctgcgtggcgcacacgacgccgtcagcgatcaccagaaaacctcacgcaactcgatgctcaactacaacctgccgtttggctggtggaacctcaattacagctacagcgagactgaataccgctccctggcccaggccagcggcttcaacttcaagcagtccggtgacagccagagccaccagttgcgcttggagcgagtcgtccaccgcgacgctctgagcaagacctccctcagcaccggcgtggcctacctgcgcaccaacaacttcatcgaagacagcaagctcgccctgagcagcaaccgcctcagcgaagcccagtttggcatcaaccacggccggcgcattggcggttcattcctcaacatcgacctgggcatgcaggacggcattggcgcgttcgacgcccaggccaaccacaacccacgccccggccaggccgatgcgcgctaccgcaaatacaccgcgacggtgagctacctgtaccccttcaagctgtggggcgagtcattcagcttcagcagcctgatgaccggccaacgcagcgaagacgtgctgttcagcccgcaacgcatgagcctgggcgggcagtcctcgattcgtggctacaaggaccaaagcctggccggcgatagcggcggctactggcgcaacgacctgcgctggagccgcccggtgacctgggtgtggctgcagccggcgttcaacgaatacggcaccagcctcggctacgaccaaggcgtgatccgccatggtcgctacaacgccgaacagcatgggcgcatgaccagcaattccctggaactgtttgcacgcggcaagaacgtcgcggccacggtgacctttgcacactctttggaacgaccggacccgatcacggaacgtgaagcgccgatctacttccgcatggatttttttctttaaattcttaccgccctttgggcatcgagatacgacatggatgttcgccagttcgccttcctcgcgcgccaaccgtctgcggccgtaaaaagccgttccaccttcctgggcttgcccaagcgcgggttggcgttggtgctggctaacgccatgttctggcagccgctgctggctcaggcggagggcattgccgtgagcgggccgggtaccacactcgggcaagcgggcaatggcgtaccgatcgtcaatattgccgcgccgaatggcaacgggctgtcgcataacaaattccaggattacaacgttggccagcagggcgtgatcctcaacaacgcgaccggtcggacccagtcgacccagttgggcgggatcatcctcggcaaccagaacctcaacggtatggccgccagcgtgatcctcaatgaggtcaacggcggcagtcccagccagttgcgcggtttcaccgaagtggcagggcagtcggcgcatgtcatcgtggctaacccgtatgggattacctgtaacggctgcgggtttatcaacaccccgcaagccacgttgaccaccggtaaagcggtaatcgaaaacggccagatcagtcgctaccaagtcgatcaaggcagcgtgtccatcgaaggcgcaggcctgaacgccaacaacatcgaccagttcgaaatcatcacccgttcggccaagctcaatgccgagattcaagccaaaaacctgacgatcattgccggtgccaacgacgtcgatgccaagaccctcaaggccaccgcacgtgtggccgacccagcaacagccccgcaactggcgatcgactcttcagccctgggcggcatgtacgccggggcgatcaagctggtcagcagcgaagccggtgtcggggtaaaactcgatggcaagatggctgccagcgcaggcgacatccagatcgacgccaacggcgacctgaccgttgcacaagtcgccgccgacggtgcagtgaacatagaggccgtcagcgccagcattcaagggcccgcctacgccggcaccacactggagatgaaaacccgaggcgacctgaccagccagaacaaccttgtcgccaaggaccgcataaccctcaccagcggcggccagttggtcaacaatggcatcatcgaaagcggagtcaatcccgataacacccgcaacaccaacgccgatatcagcatcagcgcgcagagcctcaacaacgccggcaggaacatcattgccagccgtgacctcgacatcaccaccacccagactctgaacaaccagggcggcaccctcagcggacagcggcagaccaccgtcaccgccggcaccttcgacaaccaaaacagggggcggttgctcagcaccgaccgtctgaccttgaccgccgacaaggccgtgaacggccgggacggtctgatctccagcaacggcgacctggtggtgaacgtcggcgcattgggcaatcgcggtggggaaatctccagcctggccgatgtcaccctgaatgtcgccagcctcgacaatacgtccggcttgatcgcggctgacagggggctcagcctcactgccagcggcgcgatcaataaccgtgacggcaccttgtcggcttcaaccctggcgaccttgaaggccgtcagcctggacaatacccgcgggcagattaccggcgatctgggcttgagcatcgacctcagcggtgccttggataaccatgctgggaccctgggttccggcaaggccttgactctggccgccgccagcctcgacaaccgcgcggcgggcacggtgctggcggcggacggcacgctgagtgccgccgttcacggcgcgctggataaccgcgaacagggcaagctgcgcgccacgggcagcatcgagctgaccaccggcagcctggacaaccgcggcggcagcctggcgggcaaggaccacctgaccctacgcggagggtcggcggacaatcgtggcggcctgatccaggccgacaaagacctcaagctgctggtcgatcaactggacaaccgcgacaagggcaaccttgtcgccaaggcggccgtcagcttcgaaggcacccgcctggacaatagcggtggcctgctcagcgcagtcggcccggtcagtctcaaggccaaggaggttgccaacacccagggccgtattgccagccagggtgacctcgaagccagcatcgacagcctcagccagcagggcggggcgctcgtggcccagggttccatacggctgaccggcaagagcctcgacaaccgcaatggcggcacggtcgccagcacccagggcctgaccgtcaatgtcgagcagatcgacaaccgtaccggcgagctgtccagcacccacagcagcgtcagtgtcagcgggcagcgtttggacaacagcgatggcggcaagctgctgactgagactgatcttggcgtcgcagtggcgcaagtgatcaaccagaaccagggccggctgttcgccaggggcagcgtcaacctgaatggcaagaccctggataacagcggcggcaacatcttcgccctgctgggcctggatatccgcctcgatggtgcgctgctcaacaacaccggctcgctcagcagcgaaggtgcgctgggccttacggtcggcagcctggacaacacggccggcaagctcggcagtgccgccgacctgttgatcgacagtctcggcgcggtgctcaaccagggcgggtcgatcctcacggaccagggcctggtgcttgccagcggcagtctcgacaacagccagaaaggcctgatcagcggcgagggtgcgacccgcgtcaccaccagcaccctggataaccaccagggtggccgccttaccagtggcgaccgccttgacttgacggcaacccaggtcaacaacggcgcttccgggcgtattgccagtgccaaggatctgacggccaacgtcaccgtcctcgaccaacagggcggcgaactgttcagcaagacccaactgaacctggacctgcacaacggccgcctggacaacagtggcggcctgatcaacggcccgctgctggtgctgaagaacctcgacgtggtcgtcaaccagggcggtgaaatctccagtgcccaagcctttgccctgaccgcgaaaagcctcgacaacagcaacggcaagctgctgagcaaccagggcctgaccctgcgtatcgatcaggcgctgggcaacatcaagggcctggtggccgcggcttctctcgacagtcgtagcgccagcctggacaacagccagggcctgatcagcagccgcggtgcggtcgacctcggcgtaagcggggcgttcatcaaccagggcggcaccctggtgggcgatggcgctatcctgttgacggccaacagcctggataacagcaacggtgccgtttccggaaaagccgatgtcaaagcgaacattgctgctctggataaccgcaacggcaagctgatcgccagcagcgcgctagccctgagcggcgcctccgtggataaccggctgaacggcctggtaggggcgacaaaagcgctgacactcgatgtcgacgttatcgacaaccgccgcggtgaactctccagcagtgccgatattcgcctgaccggcaagcgcctgaacaacagcgacagcggcaagctccttgccgataccacgctgacccttgaaatggccgaagtgttcaaccgcaacctgggactgctcaagggcaagactggcatcacgctggacggccaggccctcgacaacaccggcggccaactattcagcgaccaggacgcacgactcaccctcggcgctgacctcgacaacagcgctggcctgatcagcagcgaaggccggctggacgtcagcagcgtcgggctgaccaacacggccggtagtctgtcgagtggcggcgcgctcaacgtcaaggccaacggcacactggccaaccagggtggacgcctggtcagcgacagcagcatcaacctgaacagtgccagtctcgacaacacccggctgggagtgatcagcggtaaaggtgcggtgactgtcactaccggcgcctacgacaatcgcaccggcagcctgagcagcagcgacagcctcgccctgacggcagggcaggtcagcaaccagagcggccgcatcggcagcgacaaggccctagtcgccagtgtcaccggcctggaccagcaggacggcaagctcttcagcaacacggcactgatcctggacctgaacaacggccaactgaacaaccagaacggcctgatcaacgcaccgtcattgcggctcaacgacctcaagggcgtgaacaaccagggcggtgaaatctccagtgcccaggccttcgtgctggccgccgacagcctggacaacagcagcggcaaactgctgagcagccaggccgtgactctgcggatcaaccaggcactgagcaacctcaagggccagatcgccgccgccgcgctcgatatccgcagcgccagcctcgacaacagcggcggtaccgtcaccagccggggcgacctcgacctgaccaccggcggtcaactgaacaaccgcgaccagggcctgataaacgccgcccaagccctgaacgtcagcgccgccgacctcgacaacaggggcggtaccctactgggtgccagcaccgtgaccctcaacgccatagccctgaacaacagcgccaagggcctgatcaacagccaggccggcctgacgatcaacgccagccgcctggactcaggcaatggcggcgaagtctcggccaagggcgatatcgacctgagcctcggcgccctggcccagaacggcggccgcctgctcggcgaccaagccatccgcctcgacctggcggggggtgatctcgacaaccgcaacggcctgtttaacgccaagggccccctgaccatcaatcgtctgcatgacctgaacaaccagggcggcgagctctccagcagccaaagcttcaatctcaccggacggacgctggacaatagcggcggcaagctgataagcagcaaccagttgggcatgaccggcaacagcctgatcaaccagggcggcctggtttccggctggcaggggctgaccgtcagcggcgcgagcctggacaaccgcaacagcggcaccttgtccagtcgcagcggcaaccttgatgtcaacgtgagcggcgcattgctcaacagcaatgctggtgcgctggtcagtcagcagaccctgaccgtcaacgcggctagcctcgacaacagcgccggtattctttccagtggcgcggaccagcgcctgacggtcagcggtttgttgaacaacgcccagggcggctccatcgacagcgccgccaccctgacactgcaagctatgagcctaaacaacagcggtagcatcagcgcgcaacaggccctggatttcaccggcaacatcctggacaaccgtaacggttccctgagcggcaaggccgcggtcagcctcgacctgctcggcgccctgaccaacagcaatggccagctcgccagcggaggaccgctggtgatcaggcgcagcagccagatcgacaatcagggcggccaactggtcagccaagggggcctcagtctgctcaccggcagcctggataaccgcaatcgcggcaccgtcgcagcgaatgacaacttggtgatcagcagcagcggtgccgtacagaacaacagtgacggcctgatctacagccagaacggtggcgtccgcgtcgacgccgcgagcctcgcaaacgccaagggttccctgcaagggcaaggcacactggacctgacggtcagcggcgatatcgacaatcagagcggtaagctgattagccagaatggcgacctcagtgtcagcacggccagcctcgacaaccgtggcggcaccctggccagcctcaagggcgccttcgaagcccacgtcgtcggcgtgctgaaaaacggctatgacctgagcaacaatcgccagggcggcatcattcaggcccagcgtctcaacctcagcgccctgggcgggatcgacaactacggcgggcgtatcgcggcgcaaagcggcgatgccctgatcaccaccgccgacttcgacaaccgcaacggcggcctgtacgcccagggcctggtacaggtcagcggcaacaacttcgacaacagcggcgacaacgacggacagatcgcaggccagcgcatcgacctcagcctcaacggcgcgcttaacaaccgcctgggcgttattgaaagcgacagcagtttgagcgtgcgtgcggccagcctcgataaccagaccggccagatccgtgcactgggctccggcggcaagaccgacttccagatcggcggcctgttcgataaccgcaacggcaagctggaaaccgccaacagcgacctgaccctcaatgccagcagcttccagaatatgggcggcagtctgctgcatgtgggtaacggcacctttgatatcagcaccgccaatatcaccaacgccggcggcagcctgttaacccgtggcggcctgaccttgacggcggacaactggaccaacagcagcgtgatccaggccgggcgcctgacggtgaacgtcaacaccctcaaccagacggcgggcggacaactgctggcctcggacagcctgaccggcaacggtggcaattggaacaacgatgggctgatcgccagtgacggcacggccaacctgaccctggccggcacctatggtggtaacgggcgctacagcagcgtcggcaccctgggcttgagcgcggcccaggtaaccctgggcactggcacgagcattgccggtggcggggataccacgatcagtgccggtggcctgagcaacgccgggcgcctgacgtccggcggttccatgacggtcaccgccaatagtatcggcaacaccggcacgctgggagcgacccaggacctgacgctgaagactccctccctggtgaacgatcacggcctgatcttcagcggccgaaacatggacttgctggtcaatgacttcaccaacgacaacggggatgtctacagcatcggcaacctgaacatctcgggactcaatggcggtcgcgccaatagcgtgaccaacctggcgtcctcgatcaatgtcgagggggatttctcgctgtcggcgaacagcttcaacaacaagaccgaaggggttatcggcaaagagcggctggtgtcgggcgatatcacgtttaacggcagcacgttctatatcgccgaaaactacacctcggagtcgaccatcagcggcacgcgagcgagcctggcggtggccggaaacattgatggcgatgtcggccgcttttccaacaccgcttcgacgatttctgctggcaagaatattcgcttgaacgtggataccttcgagaacctggggttggaggccggcaacttcgcccgtaaccgggtctataccggcgtgcgcaatatcttcactaacaaaacttacgcgaacgaagcgctggacgcctacgcgcgaagatattcccagtacgtctaccgatacaccaagaccgtgcatgagcccgacaaaggcgggactcacaccgagctcaacgattacggcaaacaaaaaaccacaaccgtgaacaccaaattcggtcagggaccggatgtggccattcccgccggcatcctggccggcaccctgagcagcgacaacaaagtgtttaccgccgggggtggcagtgtcgcctcggtggtccaggccgggcaggcgatacagatcaacgccaagaacaccatcgacaacagcaacctgcacgccaatacccagttctccgggacgacgaagaccgggaccgggacccaggtcggcagcgcggccaagccgacggtcgtctacctgaatccgcaactgccgccgaacctgtcccagcagcgggtggaccccgtggcgtcgcggggtttcagcctgccggacggacaaaacggtctgttccgcctgagcggccagggcggttctgcggcccaggcaagccaaaccagtgccgggccacagagctggagcatgggcagcgcgacagtcagcagtgcccagcgcgaacagggcgcggatgacgtccaggcgcgcaacctgcagttcagcgatgcggcgcggatcgccgtgagcactcttcaactcggacaaagtacccgccaggccacgggcgctggggtttccggcagcgtgatcagtgtcagtgcgcccggcgattccggcagtgtccagttgccggggcaggcgggcgtggtttccacggtaggcagccaggtcatcaatcgcgtgcagggcctgccggacacttcgggcaggtccaacccgcagaagtacctgatcgaaaccaacccggtgctgaccgacctcaagcagttcatgagttcggactacctgctggcgaacctcggttacaaccccgatcaaagcgccaaacgcctgggcgacggtttctatgagcagaagctgatccagcaggcgatggtcgagcgtaccgggcagcgtttcatcgacggccagacctccgacgaagcgctttacaagtacctgatggacaacgccatcaagagcaagcagcagctcgacctgtcggttggggtcagcctgacctcccagcaggtcgcggcgctgacccacgatatcgtctggctcgaagagcatgaagtgaatggtgagaaagtcctggtgccggtgctctacctggcccaggcgaccaatcgcctggcgccaaacggggcgctgatccagggcggggatgtgacgctgattgccggcaaagacctgaataacgctggtacgttgcgggccagcaacaacctttccgcgaccgcgggtaatgatctggtcaacagcggtttgattgaggccggtaaccgcctggatctgctggcgggtaacgacattatcaacaaggcgggcggggtcatcgcggggcgtgacgtcaatatgactgcaatcgccggcgatgtgatcaaccaacgcacggtggtgggtaatgacgtcaattacaaaggttacagcgggcacaacgagtatgccgacagtggcgctcgcatcgaggcggcgaatgacctgaccatcaaggcctcgcgggatttcgtcagcactggcagtacgttgcaaagcggcggtgacacaacgatcaccgcaggccgggatgccttcattgctgccgctgagcagcacaacagcgtggcggccggcgccaagagcagcagcgttacccagtacggctcggatctgacggtggggcgtgacctttctgtccaggcggggcgtgatctggcagtggtcgccagccagatagaggccaagcgggacatcgactttggagcgggcgataaccttacggtggcttcggctgccgatgaaagccactcgtattccaagtcgaagaaagttacgaaacaggaagatcacgtcaaacagatttccagcgtcgtgagtgccggacaagacgttactttcagtgccggcaaagatatggcgctgatctcgagtcggatcaatgccggcaacgaggcttacctggcagcggttggacaactggatgtactggcggcccaggacaccgactactcgctgtatgacaagaagaagaagggcagctggggacgcaagcagaccaaacacgatgaggtgacaaaaaccatcaacgttggcacccagatcaccacggggagtgatctgacgctggtcagtggtggtgaccagcgttatcaggtcgcgaagcttgaaagtggcgcggatctgacactgagaagtggcggagccatcaccttcgagggcgtcaaggatctgagccaggaaagccacgagaagaccaacaatagcctcgcgtggaattcatcgaagggtaagggccataccgacgaaaccttgcgccagagcgaattgatcagcaagggcgacctggcgatcactgccgccaagggtctgcacatcgacatcaagcagattgaccagaagacggttagccagaccatcgatgcgatggttcaggcggatccccaactggcctggctcaaagaagccgagcagcgtggcgatgtcgattggcagcgcgtgaaagaggtccacgactccttcaaatacagcaactccggcatgggcatgggcgcaatgctggcggtggtcattatcgtaacggtagtgacggcgggttcgggaacggccgctaccgttggcgccagcgcaagcggcgccgcgacagccgcggggctcagtgcgaccactgccgccgcgattggtgcggctgcatcggcagcctataccgctgccgtggtccagactgtggtcagtacgataaacaacaaaggcaacctgagcgcggtccttaaggatgtcacctcgacggaaagcctcaaggggtatttggtcagtgggctggttgcgggctttgcatcgggtgtactggacaaggcgttcggtgtttccgccgaaaatgccagtaaagcgacccacggctttgacctggccagcaccaatgaactgaccaagtttgttggctacaccctggctgaaaagggctttggtgcagttgccaatactgcgatcaatggtggcagcctcaagaacaatctggcccaggccagtatcagtgcggctgcggatgtcctctcggcctccatctataaccggttgggtacccagttggaattcaccgggattccggccaaggtcggggcacacgcgattgtcggtggcctgatcgcagaggcggcgggaggcagctttcgtaccggtgcccttgccgccggtgccaacgaagcttttgtcgcttcggtcggcgacaagatctttgtgggcgacatgcatgatcaactgctggcgatgacctcgcagttgatcggcgtaacggtcgctggagccgcagggggctctgataaagaactggaagtggcgggctgggtcacccagcaggccaccaagttcaacagcctcgatcacccaactgccgagcgattgcttaacgagctgaaggcctgtaggtccggtggaaattgcaccgaagcgaaacagcgcgatctgataggcaagtatgaaaagatctcggccgaacgttcgcagttgatcgacctatgtgaaacccgggcctgtgtcgaaggcctgaaagccaataccatcgctatggacgacccggttgcgcaggagttggtcagcttctaccggaacaaggtttcctatgacatgaccgggatgctggtgggcaatccagggctcatcgcgcaaccggcgcaagggtatgacccttggggcaatatctatgtgaccgatgaccagatcatcacggccaaatacatcaaggaaggctggttgacgcccgccgagagcgccaatctcaaggagtgggagaacaagacctcctggctggacgatgcggcgggtcggaaactcagtgtggtcgaaagagccgccatgatcagcaacatgggcaatacgttgctgaccgagggctgggggaccaaggttgttgcgggtgtcggtaaaggtgggaaacccggcaatggtgtgtcgacggatgccgatggggtcggaaatagcgccgttgttacgaaaccggtcaagccatgctgtttcgccgcaggaactatggttgccaccccccagggcccccgggccattgacaccctcagcgtgggagatattgtctggagtaagcgagaaacaggaggggagccgttcgctgccgctatttcggctacacacgttcgtactgatcagccgatttaccagctcaagttgaaaaacatccgagcagatggagtttcagagaaagaaacgcttctggttacaccgggccatccattttacgttcccgcacgacatgactttgtgccggttatccagcttaaatcaggcgatttacttcagtcgttagggggcggtcctactgaaggtgtctcgaccagggttgagtctctggagttgtttcttccacaaggaaaaacctataacctgaccgtggaagttggtcatacgttttatgtgggtaagttgaagacctgggtgcacaacgttggtctgtgcgatattaatggcaagcctgtagtgccgaggaatgccaagaatctggaaggcggacctctggagaaagccgataagttcagtgggcattttatgctggagggagggcctgccaatggaactctttatcgtgctgataataaaggaaatataacgagttatgccgtttatgatgataaaggtatgattctcaaacgggtcgatgtgacgggcgattcacatgcagggatacccacgcctcatgctattgactatggtcgcaacaagttgccggatggatcgatcagggtacaatctccatcgagcaagaaacctccacggggcatcagtgcagaagaaattccatgaaaataatcaagattacagactcagtcagttctccaagatacgagcattggaaaagccaatgggaggatcagtccgagttggatgagttttcttatattagtgatgttgtgcatcctgaagatgccttgttgttttgcaaggttttatttccagattttgtcattcatgaatcaggtgtgtttctggagcacagctttacttttgacgcgttctctacttggatggaaacttgtaataatgatgtagtggcagtggagaaggttttgaatcatacgcatctgtatgatgtttttggaggttgtagggatagagtggatgaggctgtttatgaacagctttgcaggattgttgctcagtcatggaggatggtgttgctgagtaaatttccagaaaagaaattttgtgtgcaagcgatagtctccgatcaggaatatggcccagtggttactttttctcaggtcagagactagtttttatggatgccttctaatctatagttttttatggtgggaatttcggtttgatcgctcccacgccccagagtggtagcttttcaccggacgctctgcatccgctctttgtgacacagagtgtcacgggctgcattccacgccggagcgtgggaatgatcgcattacaggctatcggggtctccggactccagcggatatgatggtctgcgcctgattcgagaggagagcacttctgtaagcgctccatgaaccccaccttcaaagcgcttagctgatctcggatgctgtgctctcgattctctcaggagccagcacaccatgatgcgacccgatgccaaagtcgaaaaagtctatctctatcccaaacccgtgtactttcgaaaatccattgatggccttgctgcgctggtcgagctggatatcaaagtcgcggtattcgaccctgtgcttgcctaagccttgtggcttttgcgggcgtatattctttgcagccgattcttgaagctgattgagccggcgttttccgcgttcggccagcagccacataatcgtgccgatacccgctatgacaccgatcgctatccaggcgtttttggggatcgcagcgagagcactgaatgccatagcaaaaataataagtatgccggtgccaccggagttttttgctttcttccttgccatgtgtcatttcaaccttgaaagatgggtactggcgcaatggcggtatccaatatttctaacgcttgagccaatggcttggctgagcagataatcggaaagttgaacgatctgggatggaaatgtcatttcagctcgaaatttaatgcttagcgtatttcatctgaacgtcgcgacatttacgtgagccatcctcagtaatttcaagcaacagtagtgaggcctatctgacaacgacctgagtctaacggagccttccgcccccattaatagatacggaccacatgcccaggcggacattcctgcgggactttcagtgaatcacgccgctcgagcatccgtgtttgccggcaggagcggacaatttccagcgcttgagcgaatgtgcttgatcccccccctgcatcggcgctacggggtagcgtaggcagtagttcagccattaactgaggtcatcgactagcgctcaacggcggttgggaacagtgcaggggagacttttcgaaaatggaactgttgggcctcaggctgggggcatccttttcaaaccatccaaagcatgccctcagatgtgcccccaatgtagcaatccaccggaagtgaatggagctccatggtttgtggaaaggcagaaatgatcagccgaacagcctgccagacgacgtctaaagactctcagggtccccaaaaaacatctgaatccgcgaccgcaaccaccgctctcccgggtcgttatcctgcgacccacgccacgccatgtgcagttcgaagctgcgcaccggcaacggcggatcctccgcccgcaagccccctgccgaggtcaatgcctcggccgcgtagtccggcactgtcgccaggatgtccgtgcccgccagcaacgtacccaggccgttgaattgcggtacggccaataccacgtgacgtttgcggtcgagcttttccaactcttcatcgataaagccgctcaggtcgccggcaaacgacaccagtgcgtgtggccgcgaacagaagtcgtcgaggctcagggagcctggcacgctgtcagcgcgcagcagtttgggcaggctgcggcgcagtactttgcgtttggcgttggccgggaggtcggcggtgtagctgacgccgatggagatttcgccggaggccagcaagccgggcatcaggatgtaattgacgcgacgcaccaccagcacgatgccgggggcttcggcgcgcaggcgtttgagcagttggggcagcagggcgaattcgacgtcgtcggacaggccgatgcggaacaccgctgtgctggtggccgggtcgaactcggcggcgcggctgacggcggtggagatcgagtccagggccggggagagcagggcgaagatttccaccgcccgggccgacggctccatgctgcgaccggtgcgcacgaacagcgggtcatcaaacagcccacgcaagcgcgacaacgccgcgctgatggccggctggccgaggaacagtttctcggcggcgcgggtcacgctgcgctcatgcatcaaggtttcgaatacgatcaagaggttaaggtcgacacgacgcaggtcgttacggttcatcttgtgtcctggaagagtcagcaaacttgacgagagcagccatataagaagaatgaccggcatgaatcttacgggtaaaggctgttactctgcacaggaaaattgagttttcttacaagctctgaggtctattcctcagttgcggaatcaatgacaggcatgtcgactattaatggcgaccggtggtcttacccggaaagcccagatagagttcatggcattagaggttactttgacgaggtttgcgatgtcccgcacgatccgttttcacaagtttggtccggccgaggtgctcaaatgcgaagagcatgcagccgcgcagcccgcaccgggcgaagtgcaggtgcgtgtcgaagcgattggcatcagctggtatgacattctgtggcgccagaacctggcgtcttcccacgcacgcttgccgtccggccttggccatgagatggccggggtggtggtcgccgtcggcgatggcgtggacgatttggccgtgggtgacaaagtcgcaagttttccggctgagagccccaatgattacccggtgtatggcgagcagatcgtcctgccccgttcggccttgacccgctacccggatgtcttgagcccgatcgaagccagcgttcactacacgccgctgttgattgcgtattttgcttatgtggatctggcccgggtcaagcctgggcagtttgccctggtgacagatgccagtcactgtgccggcccgtcctttgtgcaactgggcaaggccctgggtgtgcgggtgattgccgcgaccaaagacagcgcggagcgcgagtacctgctgtccctcggtgcggaaaaggtcatcgtcaccgaagagcaggacctgctcatgcaaatcaacaaattcaccgacaaccgtggtgtcgacgtggtgttcgatggcttgggtggcccgcagatgtcgttgctcggcgatgtgctggcaccgcgtggcagcctggtgctgtatggcttgcaaggcggtaaccagacgccattcccggcgtgtgcggcgttccagaagaacattcagttctttgtgcactgcattggtaacttcaccggcaaacccgaactgggcatcatccaggaccaggtggccctgcagcgcgccttgcgggatatcaaccaattgaccgccgatcgcgtgttggtgccgctgaaaaccacggtgtttcccttcagccagttcgtggaagcgcaccgctacatggacgaatgcccgtgccgcgaacgcgttgcgttgcaggttgaagctgtttagggcgtaggaagattcttaaaccagccttcctaccacccgccgcatgaggcaaatgcgccatttgacaaggctgaacctgcacagcccgccaggtacccagctggcgctttagcccatgaatccggcctttctctccggcgccgccctggaatccagcgcggcgtctttgtgtgcgcgtgattaatgcaggcgacggtggtttatctgcactggttttcggtcaggttctgtatctattaatcattatttcagcactgataattacgccttcactttcatctcaaggactgagcaatgattgaatatccgacactgcaatcgcgagtgctcgaagcagagactgctgcgcttgtgcggaatcagggaagtagatatatccaggacaatcctcaatccaataagttggaaagtttgttgttttacttgtcaggcacgtcttagattgactggttaaaggcgtgtaggaagttgtcggaacattcctaggttttcagctcggccgcgctttggcctagataaatcgaggggtggagggtttcaaggctgggctgatacccgggagtgtccgtgtcgttttgttgcgcggtgctactgtttatttagcgcctcacaaagtgatgcggaactttctatgcgtgcaatagatcgggcaaacacgctcagtagttgctcgaaactgacatttcaactcaggtagtagaacgatgagcactattcacgaacaggctatgaattatgtttaccagcaagttttgcagcgtttgatcgggcactttaatcgtgcggagcgaacagcgcttcagttgttggtccagcggattgtcgtggccgcgggaggtatggagcaggtgggagactacaaggtgttgatggcccatggtggaggcgaagtcagcagctgtaccttggcattgctgcgggctgcacagctgaccatcgccgggcgagcgccacgaaccttcaagttgcgggtggcaacattgcgccattcgggcatgaccgacagcaggctcgacagcctcaatcagggttacgggcgcttgttccttcacgatgacccgagggttgaactactgatggtggagaaccaggaagtattgcccttcaaccatcaacgcccggcctctgccatggggcgagaaaccagccagcgcaacatgctgatgatcggccacctgagctcaggtgattgccgtgccactttgtgcagcgacacgtatctggcactcggggatttctaccagcgcgtgaccacctggaatggcggggtacatgccctggtcagtggtgattccccgcgcaagcaagggcagtttctggcctggctgaagaaaaccgcccagagcgctggcgttccgatccccagcacctggccgttgtcgctcaccgggttgtttgcgcgcatggacgagtggagcaccagctactaccgcgaggtgtacggtgaacattatgtcgccagtaccaacccgagcaaggcgggtcaccgtcacttggcttacatcagcatcgccgacctgctggaggatgtggatacgcaaatgtcgccgatattgactgaattcatggcgtttgctcccgacccgcttggatttcatttcagccatcctggctactccaatcctctgatgatggctcatctgcgtggcttgcaggcccgctgcctgcgggaccttgactacgaagagggggttcaaggctttatccgccaggcctcgcagttcctgcggcgccagcacctgcccgaggcgtggctggcgcaggtgggcatcggtacagacggtgcgctaacgagtaccgccgcgcagcagttctttgggctggatgaaacacagttggtgtgcctgctgttctcgccgtttatccaccatggggagcggctggaaggctatttacgtcaatgccaccctggcatgctggtggccttgcctgagttgcataaggtcctgcagggcaagcaatcggccgatatgttgcagcagtgggtcagcgacaccagtggcctgccgatgcccttgttgcaacacctctatcgcaagcgtccggtgcccagcgcggttggtaaatcgcgcagtgcaggcgccatggcccacggcaacgcacccgcttgccaattgtccgggcgatgacactgcgcggcgagcgacaagccgacttcgcgtatcaggcggtctaccgctacatgatcaacctgatcaacgaagtcagcaccgatacccgtgtaaagctgccatcgctgcggcaattggcgaggcgcctgaacgtatcgatctcgacgattcaatacgcctactcgctgctggagaaggagggcagggtctactcggtggccaagtcgggttattacgcctggccgctttcagcaagtacggtggcaggcggtagcggcgatttgcttgaccgtctttacgcggcggcacgcagcccgtgcatggcggtgttcagcggcgatgagccggcgctgctggcgtcgctggatggggcgctgttgcgcctcgaacgggagctggtgcgccagtacccgcgtcatctgcaaccctggtcacagccgtgtggcgtatgggagctgcgtgcggcactggccgcgcggtacacctcgtcgcccacgcgttgctggcacgccgacgacatctacatcggggccgacctgcgcggggtgctggatatcctgattgaggtgctgggcctgcgggggaccacggtgatcgttgaatccccctgcgactggctgattttgcgcctgttccaggattgcgcggtgcgcatcatcgagttgccctggaccccggaagggcgcctggacctgatgacccttgaccaactgttgcgcgatgagccggtgcacctggtattgctgtcgtcgaaggtcagcctgccatcaggcaatgccctgcctgcccacgaccgcctcagcctggcacagatgctggaccggtacggttgctggctgctggaaaacgacacttttggcgagctgggtttcaaggagccccaggcggcgctgcgtgaatgggtgaacccggagcggctgatggtgttttcctcgttcgagaaaatactgggggcggaagcgccctacggctatctgttgtcacggcgcatgagcagtgaactgcagcgccagtttttgctgcgctcgttccgcttatcatcgatccgccagcgcgccatcgcccgcctttatcagagcgggcgaatagacccgcacttgcgggcgttacgccaactactgcaggcgcaagcggctgaaatgagcgggcgccttgagcagcatctggggcagcaggtgagttatcggatgccggctgccggggcggcgttctggctgggctccacccaggccgtcgacatgcgccaggtcttcaagcgcctgcttgcccagcaggtcgtgattgcaccgggcgagctgttcagtgtcagcggcctgcatcatcagcacttgcgcgtgagccatacctttcatgggcagcccaacctggagatcgccttggcggccataagcgaggccttgcgtcaggctcaaacgggatgaccgcgtgaagcttctcttactgttgtaggatcgataccgtcgcgcagcagtccaactctcagtaaactgccatttttttccgaatccttctttccgaggtttatgcatgacaatcagtccttttgcgggcaagccggcgccagcccagttgctggtggatatcccgcgactggttacggcctattacactggccagcctgatgcagcaatctccactcagcgcgtggcattcggtacgtccgggcaccgcggcagctcgttcgaactgagcttcaacgagtggcatgtgctcgccatcagccaggccatctgcctgtatcgcgaagcacaaggcatcgacggcccgctgtttgtcggcctggacacccatgcactgtcgacacctgccggagccagcgccctggaagtgctggccgccaacggcgtgcacgtgatgctcgccgaaggcgatgaatacacgccgaccccggccatctcccacgccatcatctgctacaaccgtggtcgcaccagcggcctggctgacggcatcgtcatcacgccatcgcacaacccgccgcagagtggcggctacaagtacaacccgcccaatggcggcccggccgacacccacgtgaccaagtggatcgaagccaaggccaacgagctgctcgccaacaaactggccggggtcaagcgcatcactcacgcgcaggcgctcaaggccgacactacccatcgccacgattacctcaacagctacgtggccgacctggtcaacgtgatcgacatggacgctatccgcagcgccgacctgcgcctgggcgttgacccgctgggcggagcaggggtgcgctactggtcggcgattgccgagcactaccgcttgaacctggacgtagtgaacaccgaagtcgacgcgactttccgcttcatgagcgtcgactgggacggccagatccgcatggacccgtcctccagctacgccatgcaaggcctgatcggcctcaaggaacggttcgacgtggccttcgcctgcgacccggaccatgaccgtcacggtatcgtcaccccgtccggcggcctgctggcgccgaacaactacctggccgtgtccatcgactacctgttccagaaccgtccggactggcgcgcagacgcggcggtgggcaagaccgtggtcagcagcggcttgatcgaccgcgtggcggcccgcatcggccgtcgcctttacgaagtgccggtcggcttcaaatggtttgccgatggcctgttcgaaggctcgctgggttttggcggcgaagaaagcgccggtgcctcgttcctgcgcaaggacggcacggtctggagtactgacaaggacggcctgatcccggcgttgctggcagcggaaatgacctcgcgcaaaggccaggacccgagccagatctaccgtggcctgaccgacgccctgggcgaaccgttcgcgattcgtgtggacgccaaggccacaccggcgcaaaaagccttgctgggcaagttgtcgcccgatcaggtgacctcgaccgagctggccggagaacgtatccagcagatcctcagccacgcgccgggcaacaaccaggcaatcggcggcttgaaggtgatgaccgaaaacggctggtttgccgcacggccatcgggcaccgaggatatctacaagatctacgccgagagctttatcggtgacgatcacctcaagcaactggtggaagaggcgcaggtgttggtggacggcgccatctccgactaacgctgcaatatcaatgtgggagggggcttgcccccgatagcggtgtgtcagtttgcatctctttttctgaaacacagccatcgggggcaagccccctcccacagttgattgaggtcaggccaggtctaccaggacgatttcgctgtcctcgatcgcggttacccgcaaaacctgttcattctctaccgcaacaccgtctcgcgcttgtgcacgcaagccattgacttcaatcacgcccgtcgccggcactagatacgcacgacgcccaccgtccagccggtactcgacagtttccccggctttcaggttcgctgccaccagtcgcgcatccgcacgaatacgcaggctttcattgtccccggccttgccactggccagtgtcacaaacccctcgcggtcgcctttcgggaacggcttggcgccccacgaaggcggcaaaccggcttcattcggaataatccagatctggaaaatcttcgtcggcgcatcttccaggttgtactcgctgtgagcgatcccggtgcccgcgctcatcacctgcacatcaccggcctcggtacggcccttgttgccaaggttgtcggcatggctgatcgcaccttcacgcacataagtgatgatctccatgtcgcggtgtgggtgctgcgggaagccagtgccgggcgcgatgatgtcgtcgttccacacccgcaggttgccccagtgcatacgcttgaggtcgtggtactcggcaaatgaaaagtggtgatgggcgtcaagccagccatggtgggcgccgcccagggaattgaatggtcgaagttcaagcatgatcgtctcctgtggatgggcctatgatcctgcagcccatgatcgataaaaagcgtaaaaaatgcctgattcctatcgatttaatggattggttagtggcgttttgactttcagttcatcgcctaactgcatgaccgcaaagcaattggctggaactgagagtcgattccggcgaccatggcgcacttgtcacaacccagctcaacgcaggagtccgcgtgtcgcaacaaaagcctgatcttcctcccgaactgcgccccttggctgaaatgccgctattgaagcgcttggccgcgcgcctgtttggccatggcctgacccgcttgcgcgcccagcatcggttttcctggttgcacgggcaggccgacggttttcgcagtgggcacgaggcgggcgtggagtacggttaccgtgaaggcaaggccgatggtatcgaggaaggccggcaggtcctgctgattcgtgacttccgccccgatgagcaccgagcgccgcgtgtggacgacagcctgttcgatgattggcgcctgccgctcactgccgagttgaagaagcgcatcaaggcggatgtcgcgcgattgctaccggcccatgcccagcccagcgcggcgcaatggaagatgattttcagcgatacaccttcaacctcggtgattgccggggctggcgcgggtaaatccacctcgctggtgctgcgtatcctgttgctgacccattacctgggctttgagctgagctccatgacggtggtgacctttacccgagagtcgcgcaaagacttcatcaacaagctcatggaaattctcaacctgtggggccaaccccttggtatgaaagaagcgcaggccgtggtgcgtacctttcattcgcgcattctgccgatggtgcgcagcctgccgggctttgaacgcctgcaagcgttcgaaaacctcaactcgggcttcgaagacgccgacagcaacccctttgacctgcgcatcaacgatgcccagcgccagcaaatgaatgcctgttatcaccacctgcatgggcggcacccacgctttcgcgagttgattgcgccgctggcacgccatggcctgcagctcaaggaactggagcgtgatcatcctgacgtgcaaaagcgcgtagcggtgaccgaactggcagccaagcgtgatgaagagctgtgtgatgtaatcgaggacctgtggtttcgcgccggtgcctggccgatcaagggcatcgagcccaatcgccagaccgtggagatcaatggcgcgcaatttcactgccatggctatatccccgaactggacgcctgggtcgtactgggcttcgactcgcgggaaaatgcccagctcagccggcccaacgcgaaactgccagtgcgcgcagaatgggcggtaaaacgcactttgtttcaagctttctgtcgtaagccattgatatggatagacagttatgaatcctcaaggcgtctgttgagtagcttggcaggggatgccactgctgggccaggcttcgattacaaggtcacaggcgagctggcttcggcgccgttgctggacagtttcgtgatggcggccgggtttatcgagaaccttgggctggatgtacccaccgcggttgggcagatgagctttgccaaggatgacccggaccgcttcttcttcgaagccctgagcattttctggaaggccctggaagatcacctgctggaccagtcgccgccgatcatgacctacaaccgcatgttctcgctgttcggcgagaacaccccggaaaacctcaagctgctcagcgacccgctgttacggccgctgtcgcacctgatgatcgacgagttccaggacgtttcgccacagatcgtctcgtggatccgtgccagcctgcgcgagatccgcagccgtggcccggccatgcacgtcgggcgcggcgcccagcattcatcactgttgtgtgtgggggatgactggcagtcgatctacggctggcgtgggagttcgtccaagtacttcatggaattcaacacggagttcccatcgcctgccaccacccgagtgatgctgggcgagaactatcgcagtcaccagtacatcatcgacgcggccgagcatatcgtgcgcgccgcacccgccatccccggcaagaaggccaaggccagcggggcgcccaaggctttggtgccggtcatggtgctggaacgggacgatgcggcattgggacggcaattgctggagcattaccagcgcggcgaatcagtgctaatgctctatcgaaaaagtagcgataaattactgattcaagagcatattcagtcaatagttaatgtggattctagcttgccgcctccggcgcgcaggctgaaacaattgacctaccacagcgccaaggggctgcaggccgatgcggtattcctgcttggggattgccagcatgtcacccgttcgccgtataaaaaccaggtgtaccgcatggcgggcctgggcaaggacggggacagcgagccgtacgacaacgcgcagaaggacgagatcttgcgcctggcgtatgtgggcatcacgcgggcggtgagtcattgctactggtacgtggaaaagcccgaaggccaggcagtcaatgtgcccaaggcgtcggagcgggtagatggcaggaaagcgttttttgatgatcagcgcttttaggcgctgatcacttcaggcccgcagggactgcggcggcacaaacgactccaactcgtcctccaccgcctcgatgatccgctccacatcggcggcattcatcaccgtggcgcaggggatgccggcgatggcgatcaacgtctcgccgctggcccggtcgaacaggcgggcgatcatgctgccgggcgcgtccatgctgccctcgaagcccatcggatggaaatgccagcgcatcagctggcaggcgttggggaacgtcactttattcatgttgcccaccttgttcattgagcgcttcctttagctcgcggcagggggccagaccttcactggtcgtggcggtgtagagcttaaaaatagcattcgttcgtcaccgcaaggtgactttttcggccccgttcggcggttgttttccataaggttgatgtgggtcatgtcctacttgggattgggcaaaaggccattagtcggaaacgtcaattggccattgaagcacccacagaaattcggcaatctccagggtttacccgccgcagagccgtccatgcccgacatcgctgcagacgatgaatgccagcaatcccacgccacgcgagagttggtgttacgccatcacctctgctggcgccaccgggacctggaaggcgtgatgtcctactaccacccggacatccaataccacgactttttccagaaccgagtcgtcggtttcgccgacttgcgcgattacctgcaagccagcatgccccgtgaggctgacgaagcgatcgagcacagcgaccgtatccgtgccgacggcgataccgcgttcatccagtaccgcatcaccttgcggggcagccagggcctggtgtcattccgcaccagcgaagccattacggtgcgcgacggactgatctggcgggtcaacgaatacgcgtccctggtgcacgagcagccggcccaggccgcacggccctctgtcagccgcctgggcctgtcgccccagcaattggggcatatggccaatgacctgcaacagtatttcgaacgcaagcaaccttacctggacccggagctggacctgcaacgggtggccaaggagtgcggctacagccgcaatcaaatttcctacctgctgaaccaggtgctggggcaaagcttctaccgctacgtcaaccaggcaaggctccagcatttactggccgcgctggatcaggccgtaccgccgatcaaggtcgatgacctggcgtttgccgccggtttcaattcgctgtcggcgttctacagcgcgttccgccagcatacgggccagtcgcccaaggcctacgtcaaacaaatttctctgcgtgcacgcgcgcaagacagcccataacacggcgctctaggatcaaccctatcgaaacgaggtaggggaacctggcatgccggcatggcgcaacatcagtttatggatggaccagttggacgacccgctgcaggcgcggccgacgctggagcatgacctggacgtcaacgtggccattatcggcgccggttacaccgggctgtggaccgcgtactacctgaaacgccaggctcctgagctgaaaatcgccatcatcgaagcgcaaacggccggtttcggtgcatctggccgtaatggcggctggctgatgggtaatctgctgggtgaggaccgcttgctcgccggcctgaatcccgaacaacgtcgcgcttcgtttgacctgctgcacgccatccccgatgaagtggcccaggtgctggcacgtgaaggcatcgactgcgactaccgcaagggcggcgccttgtactgtgccgcgcgctaccccgagcaggaaggcagcctgcgccgctatttggacaaactctacgcccaaggcctgaccgaagacgactaccgctggctcgccccgcagcagttggccgagcaaatccgcatcgccaagccctatggcggcatttacgcgccccatgtcgcaaccatcaacccggccaagctggtgcgtggcctggcgcgggtggtcgagagcatgggcgtgatgatctacgaaaacagcccggtcacccactggcaatccggcagcctgcgtaccgcaaaggccggtgtgcgggcggcctgggtggtgccggcggtggagggctatgccaccaccttgccgccgctgggtcgctaccagctgccggtgcaaagcctgatcgtcgccaccgagccgttacccgccagcacctgggatgagatcggcctgagccatggccaggcctttggtgaaagcagtcgccaggtcacctacggtcagcgttcggcggataaccgcctggtattcggcgcgcgcggcggttaccaattcgccgggaagctacgccacgacttcgatttgaccgacagcgaagtggagctgcgtcgctatctgttcggcgagctgttcccacagctcaagaacgtcaggattacccattcctggggcggcaacctgggcatgtcgcgcaatttccgtccgcacatgctctgcgaccacaagacaggcatcgcgctgtccggcggttacggcggggagggcgttggcgcgaccaacctgggcggccgcaccctggccgacctgatcctgggccgcgacacgttgttgacccatcagccctgggtcatccgcgaacgcggcctggacgcgctcaaaccctgggaacccgaaccctgccgctggctgggctacaacgcgatcattcgcagtttcgtccatgaagaccaggtactggccaaccccaataccgccccttggcgccgcaaactggcggccggtgtggccgggttcatggaaggtttcatgcactaagtcgtttcattcacacgggaaaacccatgagcatcactcagttcaaagacacgctgaacgcccacctgccggactcgtcgcccgtcgccgtgcccttgggtgagcccattgccattgcgtcgaccctgagcgtcgagcgcaacgacggcgtcgagaccggcatctgggagtgcaccccaggccgttggcgtcggcagatcaactcccaggagttctgccactttatccagggccgctgcaccttcaccccggataacggtgaagtcgtccacatacaagccggtgatgcactgatgttgccggccaacagcaccggcatctgggacatccaggagaccgtgcgcaagacctatgtattgatcctgtaacgctttgatccttgatcgcctgccataaaaacagccctaaaaccgccaggaaatcgaaccatgaaagccattgccctgttgcccttgatgttggtggcctctgtcagccaggccaccgagacggtaaaaatctacaactggtcggactacatcgcgccggataccaccaagaacttccagaaagaaaccggcatcggtttcacctacgacgtgtacgacagcaatgaaaccctcgacggcaagttgatgaccggtaaatccggctacgacgtggtgttcccgtccaaccatttcatggcccggcagatccagggcggggcattgaagaagctcgacaagagccagttgcccaattggaagaacctcaacccggtactgctcaaggccctggaaaacaacgacccgggcaatgcccatggtttcccgtacctgtggggcagcaccggcatcggctacaacatcgacaaggtcaaggccgtgctgggtgacaacgcgccggtggattcctgggacctgatcttcaagccggaaaacatggccaagctgcagaaatgcggggtggcgatcctcgacaacggcccggaactgctgccggccgcgctcaactacctgggcttgccgcaccacagcaagaaacccgaggactacaagaaggctgaagacctgctgatgaaagtgcgaccttacgtggcgtacttccactcctcgaaatacaccgccgacctggccaacggtgatatctgcgtggccgttggcttctccggcgacatcctgcaagccgaaagccgcgccaaagaggccaagaacggcgtgaacatcggctacaacatccccaaggaaggcgccgccatctggttcgacatggtcgccatgcccgccgatgcaccggatgaaaaagccggctacgcgttcatgaactacctgctgcgtccggacgtgatggccagcatcaccaactacgtgcactacgccaatggcaaccaggccgccgacagcctggtggacccggcgatcaaggccgataccaaggtgtacccaagcccggcaatgatgggcaaattgtttgcgctggaagcgatgccactgaatatcgaccgtgtgcgtacgcgggtgtggaacaccgtccgtaccggccgctgaaattccgtggtgagcgggcttgtcccgcgctgggctgcgaagcggccctaattccagcacccggtaggtgtggcaggccgcctatggacccgtccttcactgcaggcgcggtccatagagtttctagcgattaaaaccgatttcttagactgtcatttctgacaggttttatgtttggacaaatgacttaagctcctgatgcctactagtcatcaaatggaaaaaggagtttttatgccaaacgtccctgatatcgtcctgccgaaaatctacccgttcggtagcatggtgggtgcggtaaccactggcggtgtgccgagtattttcatagcgacatcggtctatcgcgacgaacaaggtggaaatattcgatttattggccgaatggaaggttcagatccgctagcgccagcaatcatccaagtcgagattaaggatcgtgacacgccaagcggtacttacacattagcggacaaagtcttgagggttatttacgtcccgcatggctcgactgcgggccgccttgcagtcagtgccgaggtgctgtttattcgctccggtccgattgactggattcgaggacgtgtggaggctgaaaccccgcagggtgatgtgatagacgttgtgtactctatcttcggaatgggttgaaaggcttgaaaccgacagggcggttttctgaagtcgacttcagatcgccgctctttaccgggtagtgatatccgcattcacggattctccagatcatgccccaacgactggataaacaacgaaaacagctccggctgtgacgagatatccagcttggcgtacaagtgtcgacggtgcaccttcaccgtgtccggcgagatgttcaggcgttcggccatggccttggacgagaacccgcgcagcaccaggcgagcgatttccagttcgcggtccgagagcacaccacagccgaattgactcagcgcgtcccggatctggctacccatcgccggcgtacgctgggtactctgctgccagtgctgctgcatcagcggcaacacccaggctgccaccgtggtcatcaacccggtctcctcaaagctgaagcgccgctgcatgcccagcgacagcgacagcgtgcccgcgcccggcagttgcaggatgaattgcacctcgtcttccagaacgttgtcatggaagtaattgaggaagtactcactctggcgaaaatgatccggcgccacttcctccaggcggtacaccccgctggcatacccctcgcgacaggcctggaagaacgggtcgagcaaatacaagccgttgaggtacaccagcatcgacgccggcttgctgctgggctgggcgtcgtattcttccagggcctggggtggcccttccaaggggtagaagatcgccagggcgttatcgaagggcaggcattggtgcagcaacagcaccaactgcttccagaaacgctcggtgccgatgtgctcaacggtgcggcccaggccggcgtgcatcccaacctcgcgaaacaggctcatgtgacaggctcccgccggcaaaaagatcggccaagggttcggcttttgccgggtggcgtcaaggggagtacgccaataggggaattggccgacatgccctcacgtattaacgtccgcatcattcagcgggaaacatatcccgtgacttatcagatttttcgtttctgcctcataccaagaacaacgacagaggataacgatatgagcacttcccccacgcccgaaggcgtgctgaaacccaccttgagtgtgttcgatgtggtcgccattaccgtatcagcggtgacgccggccagttccgtgtttgtgatcgcaccgtttgccatccagcaggccggcagcggagtgttcctggcgttcgtgatggccggtctgctcgcgctgatgtttgcgttttgctacgccgaactgggccgtgctcacaacagcgccggtggcgaatatgtatacgccaagcgcgtgttcggcggcatggcgggctacgcgacattcctgaccgtgctggtgatgttgctgtttatcccgccggtactggctacgggcgcggcaacgtatctgaataacgccctgggcacgaagtttgattcgcagacggtggccctggtgatcgtggtgtgcagctacgccctgggcatcctcaatatcaagctcaacgcctggatcaccggcacctgcctgttgctggaagtcgcagcgctgctggtgatcgtggtgatcggcttcggcaacccggtgcaaccggccagcgtgctgttccagccgcagatcgtcgaaaacggcgtgttgcacctggcgccttgggccctggtgatcggcgcggtgggcatcggcctgttttcctacaacggctacggcccggcggtgttgctcgccgaagacatgaaatgcggcggcaaaggcgtgcacaaggcggtgttgtggtcgctggggttggtggtgatcatcgagttggtgccgatcatcgccctgttgatcggcgcgccgtccctgagcgcgatgatcagcagcccggaccccatcggctacctgctgaccagccatggcaatgaaaccctgtcgcgcctggtcagcgccgggatcttcctgtcggtgttcaacgccattgtcgccatcgtgatccagatcggccgcgtggtgttcagcagcgggcgcgatgcgctgtggacgccgggcatcaacaagctgttcacgcgcattcacccgcgctgggattcgccgtggttggctacgctgttcctggcgatcccatcggcgctgctgagtttcagctccaacctggccgacctgacgtcgttcagcgtattgctgatcatgctggtgtacctggtggtggcgttgagcgcgttgatgagccgggtgctgctgcgtgatcgcgagcatccctatcgcatgccgctgtggccgttgccggcgttggtggcggtgctgggcgcgggctatttgttaatgaccttgatcgtggcggcctcggtccgcgacatcctgatcatcctcggcctgctggccctgtcggtgatcctgtattgcatcagtggccggttgagtccggtcttccagaaattgtaaggagtagttatgcgcgcacgtcaattgggcatcacgttggggctgggcacgcccggtgagtggaacgccatcactgatgtgccgggggtacgggtcgggcacagcacgctcaagacccgtatcgatggcaagcaggtgcgcaccggcgtcagcgtgatccagccgcgcgcgggggaggctcgcctgcaaccgtgctttgccgggtaccacgtgctcaatggcaacggtgacgccaccggcctggaatgggtcagcgaagcggggctgctgaccacgccgctggccatcaccaacacccacagcatcggcatcgtgcgcgacagcctgatcgccctggaacgcgaacgcctggcggacccggcggtgtattggtgcatgccggtggtgatggaaacctatgacggcctgctcaacgatatctggggccagcacgtggggcccgagcatgtgcgcgaagcggtggacaacgccgaaaccggcccggtgcaggagggcgcggtcggcggaggcaccggcatgatctgccacgagttcaagggcggcatcggtacatcctcgcggcgcctgccggcggagcagggcggctggaccgttggcgtgctggtgcaggccaaccacggcaagcgccaggaactgcgggtggacggctacccggtggggcgccgcctgatggacattgcgtcgccgttcgcagagcaaggtacgccgggcatgggttcgattgtggtgatcatcgccacggacgcgccgttgctgccgcaccagtgccagcgcctggcacaacgtgcatccatcggcatcgcccgcaccggcggcggcaccgaggactccagcggcgatctgttcctggcgtttgccacgggtaaccaggatttgccgccggcggattacgggcgcaagggcctgccgttcagcagtgcattgcagatggtcaacaacgaccatatttcgccgctgttcagcgcggcggcggaggccgttgaggaggcaatcatcaatgcgatgctggccggggaggacatgctcaccgatcaaggtgcgcgcgtgccgggcctggacgccgacacgctgttggcggcattgcacaacaccggctggagtgtgtcccggaaataggggacacactaacttattactataaatagtggctgtttaatgttgccaatggcaccgtggcaatatattggatccattaatagcgaatgccgctcaacttgagcggcattagtgctatttaatatttaaataccgttgcggtgttttttgtcggacaacagcggtactccccaataaacagggagcggaacttacacggagtgtttgcctggggttttttagtgctggaaaagatgtagacgaaagatttcaagttgtgtcagttttcttacgccttcaaaagaggcgagtgataggacgatctcgcccgcggggttcctatcgatcaaagactgatgcacttgcaaacaaggaagtacgtttatgtcaaaagtaaaagacaaggctatcgtgtcggcggcgcaagccagcaccgcttactcgcaaatcgataccttcagccatctgtatgaccgtggcggcaacctcacgatcaatggcaaaccctcctataccgttgaccaggcggccacccagctgctgcgcgacggcgccgcgtaccgggactttgacggcaacggcaagatcgacctgacctacaccttcctgacctcggcctcctcgagcaccatgaacaaacatggcatcgcaggcttcagccagttcaatgcccagcagaaagcacaggccgtactggccatgcaatcctgggcggacgtggccaacgtcaccttcaccgagaaagccaccggcggtgatggccacatgaccttcggcaactacagcagcggccaggacggcgcggcagccttcgcctacctgcccggcactggcgcaggctacgacggcacctcgtggtacttgaccaacaacagctacacgccgaacaagaccccggacctgaacaactacggccggcagacccttactcacgaaatcggccacaccctgggcctggcccaccccggcgactacaacgccgggaacggcaacccgacctacaacgacgcgacctatggacaggacacgcgcggctacagcctgatgagctactggagcgagagcaacaccaaccagaacttcagcaagggtggggtcgaggcgtacgcgtctgctccactgatcgacgacatcgcggcgatccagaagctttacggcgccaactacaacacccgtgccggcgacaccacctacggcttcaactccaacaccgggcgtgacttctacagcgccacctccaatgccgacaagctggtgttctcggtgtgggacggcggtggcaacgacaccctggacttctccggttttacccaaaaccagaagatcaacctcaatgaagcctcgttctccgacgtgggcggcctggtgggcaacgtgtccatcgccaagggcgtgaccgtcgagaacgccttcggtggcgccggcaacgatttgatcatcggcaataacgcggccaacgtgatcaagggcggtgccggcaacgacatcatctacggcggcggcggggcagaccagctgtggggcggcgcgggcaacgacacctttgtgttcggtgccagctccgattccaagccgggcgcggcggacaagatctttgactttacctccggttccgacaagatcgacctgtctggtatcaccaagggcgcaggcctgaccttcgtcaatgcctttaccgggcatgccggcgatgcggtcctcacctacgccgcaggtaccaacctgggcactctggcagtggacttctccgggcacggcgtggcggacttcctcgtcaccaccgtcggccaggctgcggtcagcgacatcgtggcgtgatgcacgggcgcggcgcttcggcgccgcgccttacggatggagcatgaagatgcggcgtatgtttaatctgatcgcctgcgtgctgcaggtgatgttcgtgtcggcaggagcccacgcaatggcaagcagtctcgtattacctacctccgcccagttggccgggcattggcagttgcaccagcaggaccaggtctgcgcgctggacttgctggaacaggccaatgccttgggcggcgatgtggcgtgtgtcgccaactggttgggcgacaagcccctgacctggacgccaacgccggatggtatctggctgatgaatgccgaaggcagtggcattactcacctcaaccggcagaaagaaggtgaatataaaggccgcacgccgacgggcctcgaagttgtactgcaacgcgcaccttagttgccgttataagtaaataacttgatttcattagttgaccgctccgttagccggggctggggcaactattgcgcgcaattgggttcagggaagatcagaagctatggcgaagtcccatgccgtcgcgccgttattcaaggcgctgggtgagtacaagagtattttgatcagcattggctgtttcacggcattgattaacctgctgatgctggtgccgtcgatttatatgctgcaagtgtatgaccgcgtgctgtcctcccagaatgaaaccaccctggtgatgctgacgctgatggtcgtgggcttctttgcctttatcggcctgctggaggtgatccgcagttttatcgtgatccgcatcggcagccaactggagcggcgtttcaacttgcgcgtgtacaaggcggcgtttgaacgcaacctgcaacgcggccaggggcacgccgggcaatccctgggggatttgacccatatccgccaattcatcacggggccggcgctgttcgcattttttgatgcgccgtggtttcccatctacctgtttgtgatttttttgttcaacgtctggttgggtgtgcttgctacggtcggcgccgtgctgctgatcggcctggcatgcctgaatgaatacctgaccaaaaagccgttgggcgaagccagcggctactcccagcaatccacgcaactggccaccagccacttgcacaatgccgagaccatccaggccatgggcatgctcggcgcactgcgcactcgctggttcgcgctgcattctcagtttctcggcttgcagaacaaggccagtgacaccggttcggtgatcacctccctgagcaaatccctgcgcctgtgcctgcaatcattggtgctcggcctgggggccttgctggtgatcaagggcgatatgactgccgggatgatgatcgccggctccatcctgatgggccgggtgctcagccccatcgaccagttgattgcggtgtggaagcaatggagtgcggccaagctggcctatcagcgcctggacgacttgttgcgcgagtttcccccggaggtcgagcagatgaagctgccggcgcccaagggccaggtcagctttgaacaggtcagcgccggcccgcccggacggcgtatggcgaccttgcatcaggtcagcttcaacctcggcgccggcgaagtgctcggtgtgctcggggcatcgggctccggcaaatccaccctggcccgggtgctggtgggcgtatggccgacactcgctggcacggtgcgcctggatggcgccgacatccatcgctgggaccgcgacgacctcggcccgcacatcggctacctgccccaggacatcgagctgttcagcggtagcatcgctgacaacatcgcacgctttcgcgaagccgaccccgagcaggtggtgcgtgccgcgcagcaggccggtgtgcatgaactgatcctgcgtttaccccagggctacgacacggtgcttggggacaacggcggcggcctgtccggcggccagaagcaacgggtggccctggcccgcgccctgtacggcgggccgcgcctgatcgtgctggatgagcccaactccaacctcgacaccgtgggcgaagccgccctggccagcgccatcgtgcagatgaaagcccagggcagcagcgtggtgctggtgacccatcgttcgtcggcgctggcccaggccgacaagttgctggtgctcagcgacggtcatttgcaagcgttcgggccgagccaggaggtgctgcgcgcattgtcgggccagccggaaacgcccaaggacaaaccgggcgtgagtttcagtcgtcagtaccaggccacaaggaatccaggcgcatgagcagcatcacggttgaaccacgcttcaaagagcacgacgccaggtttttcgcgcgcatggggtggttgctgaccgtggtcggcgccggcgggtttttcctgtgggccagcctcgcgcccttggaccagggcatcccggtacagggtacggtggtggtgtcgggcaagcgcaaggccgtacaaaccctcagcccgggcgtcgtcagccggattctggtaaaggagggcgagcatgtgaaacaaggccaggcgctgttccgtctcgaccagacccagcaccaggccgacgtgcaatccctgcaagcccagtaccgcatggcctgggccagcgtggcgcgctggcagagcgagcgcgacaacctcgccagcatcgcatttcccaccgaactcagtgccgctcccgaccccgccctggcgttggtgctggaaggccagcgccaattgttcagcagccgtcgcgaagcctttgcccgcgagcaggccggcattcgcgccaatatcgagggcgcgaccgcacaactgggcggtatgcgccgtgcgcgcactgacctgaccgcccaggcgcaatccctgcgtgaccaactgagcaacctgcaacccctggccgacaacggctacatcccgcgcaaccggctgatggagtaccagcggcagttgtcccaggtgcaacaggacttggcgcagaacactggcgaaagtggccgtgtggaacagggcattctcgaatcgcgcctcaagctgcaacaacacagtgaggaatatcaaaaagaggtacgcagccagctggccgatgcgcaactgcgcagcctgaccctggaacagcaactcacttcggccgggttcgacctgcaacacagcgaaatcaacgccccggcggatggcatcgcggtcaatctcagcgtgcacaccgaaggcgcagtggtccgcgccggtgaaaccctgctggaagtcgtgccccagggcacgcgcctggaagtggaagggcacctgccggtgcacctggtggacaaggttggcacgcacctgccggtggacatcctgttcaccgccttcaaccaaagccgtacgccccgggtgccgggcgaggtcagcctgatttccgccgaccagatgctcgatgaaaagaccggcgcgccttattacgtgctacgcaccacggtcagcgaagcggccttggaaaaactccacggcctggtgatcaagccgggcatgcccgccgagatgttcgtgcgcaccggcgagcgttcgttgctcaattacctgttcaagccgctgctcgaccgcgccggctcggcgttgaccgaggaatgaacatgaaaccggtgtttatggccttgctgttcacctgcgcgagtgcccaggcggccatggggccgttcgatgtgtacgagcaggccctgcgtaacgatccggtgtttctcggcgcgatcaaggagcgcgacgccggcctggaaaaccgcgccatcggccgcgccggcctgctgcccaagctgtcgtacaactacaacaaaggccgtaacaactcccaggccaccttgccggacgggcgcggtggcaactaccacgacgaccgcaactacaacagctacggctccaccttcagcctgcaacagccgctgttcgactacgaggcctacgccaattaccgcaagggcgtggcccaggcgttgtttgccgatgaaagctttcgtgacaagagtcaggcgttgctggtgcgggtgctgacctactacacccaggccttgttcgcccaggaccagatcgacatcgcccgcgccaagaagaaggccttcgagcaacagttccagcagaaccggcacttgttccaacagggcgagggcactcgcacggacattctggaagccgaatcgcgctacgagctggccaccgccgaagagatccaggcgctggatgaacaggacgcgtccttgcgcgagctgggcgccttgatcggcgtacagagcgtcgacatccacgacctggcgccactgaaccaaggttttgccgcgttcaccctgaccccggccaactacgacacctggcatgagctggcgatcagcaacaaccccacgctggcctcccagcgccaagccctggaagtggcgcgttatgaggtagaacgcaaccgcgccgggcatctgcccaaggtcacggcctatgccagttcgcgtcaacaggagtccgacagcggcaacacctacaaccagcgctacgacaccaacaccatcggcgtcgaagtcagcctgccgctgtatgccggtggcggcatctcggcctctacccgccaggccagccgcgccatggagcaggccgagtacgagcttgagggcaagacccgcgaaaccctgatcgaactgcgccgccagttcagcgcctgcctgtcgggggtgagcaaattgcgcgcgtaccagaaggccctggtgtcggctgaggcgctggtggtgtcgaccaggcaaagcatcctcggtggcgagcgggtcaacctcgacgcattgaacgccgagcagcagctctacagcacccggcgcgatctggcccaggcgcggtatgactacctgatggcctggaccaagttgcattactacgcgggcaatctgcgcgataccgatttggccaaagtggatgaggcgttcggccctgcaaggggtgtaaatcaataataagaggggtaataccatgggtatctttgactacaaaaacctcggcaccgagggttccaaggcgttgttcgccgatgcgatggcgatcacgttgtacagctatcacaacctggataacggctttgccgtggggtaccagcacaatggcctggggctgggcttgccggcaacattggtcggcgcgttgctcggcagcaccgattcacagggcgttatccccggcattccgtggaacccggattcggaaaaagccgccctggaagcagtgcaaaaggccggttggacgccgctcagcgccagtgccctgggctacggcggcaaggtcgatgcgcgaggtaccttcttcggcgaaaaggccggctacaccacggcccaggtcgaggtgctgggcaagtacgatgatgccggcaagctgctggaaatcggcattggctttcgcggcacctccggaccacgggaaaccctgatcagcgattctatcggcgatctggtcagcgacttgctcgcggccctggggcccaaggactatgcgaagaactacgccggcgaagccttcggtggtttgctcaaaaatgtcgccgactacgccagcgcccatggcctgagcggcaaggatgtggtggtcagtgggcatagcctgggtgggttggcggtcaacagcatggccgacctgagcaacagtaaatggtccggcttctacaaggacgccaactacgtggcctatgcctcgccgacccagagtgccggcgacaaggtgctcaatatcggctacgaaaacgacccagtgttccgggccctggatggctcgtccttcaacctgtcgtccctgggcgtgcacgacacaccccatgcgtcgactaccgacaacatcgtcagcttcaacgaccactatgcgtcgacgctgtggaatgtgatgccgttttccatcgtcaacctgccgacctggatctcgcacctgcccaccggctatggcgatggcatgacgcgcatcctggagtcgggcttctacgagcagatgacccgcgattccacggtgatcgtggccaacctgtccgacccggcacgggccaacacctgggtgcaggacctcaaccgcaatgccgagccgcacaaaggcgataccttcatcatcggcagcgacggcaatgacctgatccagggcggcaagggcgtggactttatcgaggggggcaagggtaatgacaccattcgcgacaacagtgggcacaacaccttcctgttcagcggcaacttcggtaacgatcgggtgatcggctatcagcccacggacaagttggtgttcaaggatgtggcaggcagcgccgacttgcgtgaccatgcaaaagtggtcggcgcggatacggtgctcacctttggcgccgactcagtgaccttggtcggcatcgggcaaggcggcctctgggcggacggtgtgagtatcgggtgaatgatgcttatggcgttcagccagccaatcccccaggaaggcctggggtatcggctgaatgcagcggcgtggaaaatccttcggtaaataaatatctacctggttgtcgcgacggatcgctcggtgtgcctgcgtttaacgatcaagcgagccgtttcgcgtgatgacgtgggaggaaccgagcatgtgccgattgcgattgttgctgtgcgccctggtactgctggggttggctgggtgtgcggtgtacccggcgtattcgggcccgtgctgctatcacccgtactaccactcgtactattaccatccctactatcacccgtattaccacccgtattaccggtattgaccgggcgacaatgcaaaaaaagccccgcactgcggggcttttcattgttatttttctttgatcaccgtcgcgacatcggcagccttgacccgtacccgcttaccggcgatgtcggtgaattcgtagaagccatcggcggtcttggcgtttggggtgtccttggtcaaatactgcgtgccattttgcagtgtcactacggtttgcgtcgcgcaaccggccaataccagaaaagtgagtgcaaccagcggcagacccaaattcttcatgttcataacccttaccttgactttgaaaagtcccgcgccagaggcggcgggcgacaaatgttacgccatcgattctcccatctgatcgcttttatacaaaaagttgcaggcgccatttatctattaccgattgcaacaccgcatttggagcggcactctgtatgcataaccagtattcgatcagcgcgtgaaatggccaatcccctcgacgatcccctgtattacctgcataacttccgccaagtgctgctctggctggggcagcgctatgccgatttgctcgacccggacgaacagcgttttattcagcaatttgacaggttgccgcaggcgtcccaggcgcttttggtgcgcatggtgatgcgcaagggcgtgcactttcgtgcgggcaagctcaattacctggagattggttgcccccacgccgctgccgggccgctgatggaactgggttgggtggacgatcagtacctgctggcctttgaagagctgttcgccgtgctgcaaaaaggtgaaatcctggccactttcaaaccctggatcgagcagcccaaaggcaagaaaaccgattggctggaagggttgtcggcacaattcaccgacagccgcagctttgccacctggtgccccgacctggccgacaggttgttcagcctcaccgtgatggaactctgcgaccgtctgcgcctgatgttcttcggcaacctgcatcaggactggtccgagttcgtgttggctgacctgggcatctacacctatgaaaaagtccagttctgcgccgaatcccgtggtttgcgccaccgtgacgatgtgcaggggtatctgttcctgcaccaatgccagcaggcgtacgaggccggtgagccgctggaagatgtactggccggggttgccacgctggacaccgataacccctggctggagaaacgccgcgccaagttgttgtttcagatgggtcaatattgcgagcgtactgccgagctggccctggcggagcggatttaccggaactgcacctaccccggtgcccgctcacggttgatccgcgtgctcgagcgccaggaggattacgcccacgccatggccctggcgaacaccgcccaacaggcgccggaaagcgccgccgaacagcagcacttgctgcgcgtcatcccgcgcctgcgccgcaaactcggcgagccggcattgcccaaggtcaagccacgaccgttgacgcgcctggacctggccctcacgctgccggaacccttgatgtcggtggagtactgcgtgcaggcgcacctcagcgagccggatgggccggtgcactacgtggaaaacggcctgatcaattcgctgttcggcctgctgtgctgggaggtgatttttgcgccgctgccgggttcgttcttccacccgttccagcgcggccctgccgacctgcacagcgcggattttcaccagcgccgagcgccgctgttcgacgcgtgtttcgagcagctgcaggacgagcgctacaaaaccactatccgccaacgctaccgcgacaaatggggcatccagtcgcccttcgtgttctggaacctgctcagcgaagagctgctggagcaggcgctggcctgtttgcccgccgagcacctgcgctactggttcgagcggctgctgctggacatccgcgccaaccgcgccggcatgcccgacctgatccagttctggcccgcgcaaaagacctaccgcatgatcgaggtgaaaggccccggcgatcgcctgcaagacaaccagctgcgctggctggagttctgcggcgagtaccagatgccggtgacggtctgctatgtgcgctgggcaccacccgcttgagctacaccgtggcggtgcgggcgctgtgcgaattcacggccaaggtcggtgacctcgacctgcgcttcacgccgtcgccgagcgcccaggagggcatcgccggccaccgcaccgtggcctcgcggcgcagccagcactaccagaatgaagtggcgctggagggtcaataccagcagctcacggtgcggggcagggcggatggctatgacccggacgccaatcgcctggaagaagtgaagacctatcgtggtgacctcgatgcgcagcccgccaaccatcggcaattgcactgggctcaggtcaaggtgtatggctggttgatgtgccagaaactcgggctcccggacatcgacctggcgctggtgtacttcgatatcgtcggtgagggcgagacgctgctcaatcaacgcttcgacgccagcgacctggaagcgttcttcaaccagcaatgcgcgctgttcctcggctgggccgagcaggaaatgcggcaccgtgaagcgcgcaacgccgccgcgcaaaccctggcgttcccccatgcggattttcgccctggccagcgttcactggccgagtcggtgtacaaggcggtcagcaccggccgctgcctgatggcccaggcaccgaccggcatcggcaagaccatcggcacgattttcccgttgctcaaggccctggcgccccagcaactggacacgctgttcttcctcaccgccaagacccccggccgcaaactcgccctggacgccgcccaagtgttgtatgccagccgccctggcttgccactgcgcgtgctggaactggtggcgcgggacaaagcctgcgagcacctggacaaagcctgtcacggcgagtcctgcccgttggccaaggacttctacgaccgcttgcccgccgcgcgcatcgccgcgtccagggtgcgcctgctcgatcagcgcaacctgcgtgacgtggccctggcccatcaggtctgtccgtactacctgagccaggaaatggcgcgctgggccgacctggtggtcgccgactacaactactactttgactttggcgccatgctgttcagcctggcccagctcaaccaatggcgcgcggcggtgctggtggacgaggcgcacaacctggtcgaacgggcgcgttcgatgtacagcgccagcctcgaccagtaccacctcaagaccctgcgtgacagcgccccggagccgttgaagaaacccttgcagcgcctcaaccgtgagtggaacgcgctgcacaaggaccagctcgcgccgtaccaggcctacgccgtccgcccggacaaactgctgcaggccctgagcctgtgcgccagcgccatgggcgaatacttcaacgagcatccggagtccctcagcggcgacctgcaaaccttctatttcgacgtgctgcaatttgccaaggtggcggagctgttcaacgagcacttcattttcgacatcagcaagcgccagctcagcggcaaacgcagcagttccacgctgtgcctgcgcaatgtggtgcccgccgaattcatccgcccacgattgacggctgcccgcagcagcgtgctgttttccgcgaccctgagcccccggcattactacgccgacctgctgggcctgccggccgacaccgcatgggtcgacgtggaatcaccgttcaaggccgagcaattgcaggtgcgcatcgtcgatgaaatctccacgcgcttcgtgcatcgccacgcttcgctggagcctatcgtcgagctgattgcgcaccagtacacgcaacaaccgggcaactacctggcgtttttctcaagcttcgattacctgcaacaggtcgcgcagctgctggccgagcgacatccgcagatcgtgctgtggcagcagtcacgcggcatggccgaggccgagcgccaggcgttcctcgaccagttcaccgagcacagccagggcatcggttttgccgtgctgggcggcgcttttggcgagggcatcgatctgccgggggcacgcttgatcggtgcgttcattgccaccctcgggttgccgcaactgaacccggtgaatgaacagatgaaactgcgcatgggtgcgatcttcggcgcgggctacgactacacctacctgtatcccggcctgcagaaggtggtgcaggcggcgggccgggtgatccgcagccagcaggaccggggcgtggtgatgctgatcgatgaccgtttcggagaaggccgggtacgccagttgttgccgcgctggtgggcgctggcgtgagttattcctgctatcaatgatgctggcgccgtggccggcaatcgcgcacgctggcaaaaacctggaagaaggcgatgcccatgagccagcagatcatcagcgtcaacggtattgagttgagtgtccacattgtcggccctgagcagggcacgccgatctggctgctgcacggtttcccggagtgctggcactcctggcgcgagcagattcccgcgctggcggcggcgggctatcgggtatttgccccgcaaatgcgtggctacggccattccagcgcaccggccgaggtggctgattacgacgtgctgacgctatgcggcgatatccagcaggccatggaccactttggtcattcccaggtggtgatggtcggccacgactggggcgcggtggtggcctggcacctggcgttgctcgaacctgaacgggtcacgcgcctgatcacgatgtcggtgccgttcgccgggcgagcgcggcggccggtgatagaaatcatgcgtgagctgtacgccgaccgtttcaactacatcctgtatttccaggaacccggcgttgccgagcaggaattgaacgccgatatcgaacgcacattgcggctgttcatgcaggatcaggatgtgtttttgcaacgcaaaccggcgaatgccaggttgcttgaaggcgttccagcacccggcgcgttgccacactggtgctcccaggcagacctcgacgtctacgtgcaaaccttcgccgagcaggggtttcgcggcccgttgaactggtaccgcaacttcgagcgcaattggcaacgcacggaacacctggcgggcaagcaggtgctgcaacccacgttgttcctgatcggcgaccgcgacccggtcggggtattcgaggcgcatacgctcaagcgtatgccggactcagtacctcagcttgagcagcacgtgctgcccaactgcggccactggatccagaacgagcaggggcaacaggtcaacgcgctgatgctcgggtttctaggcaaaacgtaaaggtcgcacctcggccggggcggtccaccaggctgatgctgcgcccgtgcagttgcaggatgcggtgcacgatgcgcaggcccaaccccccgtcgcgccgggcgccaccaatggtgaatgcgcgcaggaacaagccttcgcgtaattcagcgtcgatgccaggcccgctgtcgctgaccgtgaccgctaccgcgtgtgcttgaggcgacaggatgacctcgatttcgccattcaccggtgtgtgccgcagggcattgtccaacaggttggtcagcacccgttcgatcaaccccaggtctgcctgcaccgtcggcacctgcggcggcaggctcgccgtcagcgtgatgccgcgtgcttcggcggtgagttcgaatttctggaagatgtcctgcaccaggtcgggcaatgaaaaaccttcgatcactggctgcacaaagccatgctccaggcgtaccagttccagcagcgattgggccaggccgccgactttgcgactctggtccaaagcaatccctaggtagcgacggcgctcttccgggctgaggctggcgtccttgagcgagagggtttccagatagccatgcaaagaggccagcggtgtgcgcaggtcatgggagatattggcgaccatttcccggcgttcctggtcctgatgggtgatggcgcgccattgttcgcccaggcggttctccatttgcatgaaggcctggtccagcaccgcaatctcatcgccgctggtgagtggcggtgcggtggtttctgccggtttgggcgcgccattgatgtcgaactggccaaccttgtcggtgagttgacgcagcggccgggtgatccaggcaaacgcgatcaggccggccatcaggcagagcagggcgaccaggccgatggaccacagggcaatcttcaaggccatgcccgtggcgtccttggcgtcgtattcatcgtgggcttctccgagcagcaccacatacaggaatccggtctgcttaccgccggccatgaggggcgcggcgctgaataccttgcgcccatcgacgctgcgcgggtcgtccccgaggatcggcagcatgaagcccgccaggaagcgccggatgggcgccaggtcgaccttgtcacgcagcaggtggccgctgggcgcggcattgccgaccacacggccatcgatgtcgagcaggtacacctcgacgctggggttgaccagcatcaactggctgaacaggttgcgcacggcgtcgggcttgaggccatcagcgtccatcagttgggtgtcgcgggcgatatgcgccgcgagatcgcgggacaggccttgcaccacttccagctcgtgcatgtggttggaacgcacctgcagccacgccgacgtgccgctgcagatcaacagcaaaaccgcgaacaccagcgacaggcgctgggtgagggtgagcttcatggcgggctctcggcaaacttgtagccacggccccacaccgtgaggatgcgcgccgggttggccgggtcggcttcgaccttggcccgcaggcggttgatgtgggtgttgaccgtgtgttcatagccttcgtggctgtagccccacaccgcgttgagcaagtccatgcgcgagaacactttgcccggctggcgcgcaaagaagtacagcaggtcgaattcccgtggggtgaggtccaggcgctggccttgcagggtggcatcgcgggtcagcgggttgatgaacaattggccaaggtcgaggctgccggcgtccatcttcaggttacgcgccatggcgtcgacccggcgcagtaacgccttcacgcgggcgaccagttccggcatggaaaacggcttggccaggtaatcatccgcgcccagctccaggccgaggatgcggtgcagttcgctggagcgtgcgctggtgatgatgatcggggtgtagcgcgtcatggcgcgggcgcggcgacagatctccagaccgtcgacgccgggcagcatcaggtcgaggatcagcgcatcccagccgccttgctccagcaggcgcaggccttcgttgccatcggtgctgtgcaccacctcgaactgttcgtcacgcaggtgcaggcagatcaggtcggcgatatgggcatcgtcctcgaccaccaggacacgtttgggctgatccatgtaagagaaaccttcgcttgtagttcgcgcattgtgcggcttttgcaacagtgtagttatcacgaattgtttaactctgcgtgaggattccgcgaccgtaaacagcccaagattccctcacttcaaagagggaaagcaccatgtactcacgccgacaaatactcctggccagtggcggcctgggtgtcgccgtcctggcgggcggcctgctcaagcaactcagtatggtcaccgaagccgaagccgccgaaaccttcgaggtcagccacaccgacgcgcaatggcacagcctgctcaccgacgagcaatacgccatcctgcgcgaggagggcaccgaacgcccctacagcagcgcgctcaacgatgaacaccgcgccggcaccttcgcctgtgccggttgcgcgctgccgctgtttgcctcgaccaccaagttcaacagccacaccggctggccgagtttctggcagccactggacaacgcggtggccagccataccgatacgtcctacggcgtggtgcgcaaggaaatccactgccgccgctgtggcggccaccaggggcacgtgttcgatgacggcccgccacccaccggcctgcgctactgcatgaacggcgccgccatgacgttcacggcggcgtaagccgatgtctatttcttataagggtccatcccatgtggcttctggttctcgcgtacctgggcggcgtgctgacaatcgtcagtccgtgcatcctgcctgttctgccttttgtcttcgctcgcaccgggcagccgtttttgcgcagtggcttgccgctgttagcggggatggcggtgacattcgccctggtggcctcgctggcggcggtgggcggcggctgggtggtgcaagtcaatcaatacgggcgctggctcgcgttgctgtgcgttgccctgttcggactcacgttgttgttgccgcaactctcggagcgcctgacgcgcccactggtagccgccggcagtcgtttgtcggaagccgccggggccgatgccaggccgcgtccgggcgcgtcgttcctgatcggcgtggccaccgggctgctgtgggcgccgtgcgccgggccgatcctggggctggtgctcaccggtgccgcgctgcagggcgccagcatcggtactaccttgctcttgctggcttacgccgccggtgctgccacctccctcgcgctggcgttgctggtcggcggtaaagtctttggtttcatgaaaaagtccctcggtgccggcgaatggctgcgccgtggcctgggcgcgctgatgctggccggtgtggccgcgattgcgctgggcctggacacaggcgtgctgtcgcggctgtcgaccgcgtccaccggtggcctggaacaaagcctggtggatcgcctcagcgccaagccggcgcagcccggcggtgcgatgatgatggccgccaatcacagcgacaccttgccgatcgaaggcgcgctgccatccctcgatggcgccgtgcaatggctcaacagcccgccactgaccgccgaagcactcaagggcaaggtggtgctggtggatttctggacctactcctgcatcaattgcctgcgcactctgccgtatgtaaaggcctgggccgaaaaataccgcgaccagggcctggtggtgatcggcgtgcatgcgccggaattcgcctttgagcgcgacgtgaacaacgtcacccaggccatgaaggacctgggcatcacttacccggtggccatcgacaacaactacaagatctggcgcgcgttcaacaaccagtactggccggcgcattattttgccgacgccaagggccagattcgttatcaccacttcggtgaaggcgactacgccgagtcggagcgagtgatccagcagttgctgcgtgaagccggcgcgaagaacgtcgcgggcggtttgatcgaggccgatgccaagggcgtgcaagaagcgccggacatgaacgaggtgcagtcgccggaaacctacctgggttcgcagcgcgccgaaaacttcgtcaagtccggccccctggcactcaataattggaccctgcaaggccaatggaacgtcggcggccagcaagccaccctcgaccaggccggtgggcgcatcgtctaccgcttccatgcccgcgacctgcacctggtgctcgccccgggcgccgacggcaaaccggtgcgtttcaaggtcacgctcgacggccaggcgcctggcgatgcccatggcaccgacgtcacgccggatggcagcggcaccgtcaccgaacaacggttgtaccaactggtgcgtcaaccgggtgccgtgcaagaccgcaccttcaccattgaattccttgaccccaacgtgtcggcgtatgccttcacctttggttaacccggagtgcctgccatgaatgtattcaaatacctgcccgtgttggccttcgccgcgttcgtcggccaaagccaggccttttccttcggcgccgccgccgacgccgtagtgatcgcgccacccgccctggacctgcccgccgaagccggcaacctgcaaaccgctgtgttcgccgggggctgtttctggggtgtgcaaggggtgttccagcatgtgcaaggcgtgaaaaacgccgtgtccggctacgatggcggcgccgcaagcacggcgcagtatgagtccgtcagcgacggcaacaccggccacgccgagtcggtgtcggtcacctacgacccgagcaagatcagctacggcaaattgctgcaaatctacttctcagtggcccacaaccccaccgaactcaaccgccagggccctgacaccggcacccagtaccgttcggcgatctttgcgcagaatgccgaccagcaaaaagtcgcccaggcctacattgcccagctggatgcggccaagtccttcgacgcacccatcgtcactaaaatcgagatggacaaggtgttctacccggcggagtcctaccatcaggacttcctcaccgagaacccgtcttacccgtacatcgtgatcaatgatctgccgaaggtggcgcagctcaagaagcttttccccgaccagtaccgcgccgagccagtgctggtaaaacaccagtaaccggaatgtgggagggggcttgcccccgatagcnnnnnnnnnnnnnnnnnnnnnnnnnnnnnnnnnnnngctatcgggggcaagccccctcccacattgtttaatcccagtggacgttagatgacctccaggtacgagctgtgaatcgcccgcgccagctcgcgcacggtgtcgataaattccgtaagacggctgtgcaggccgtcttcaaggatttcatcaatccccgtataccgcagccgcgcctcgaactccgctgccaggcgctgcgccgtgcgcccataactgccgggcaggtccgcgaggatatggctcaactcctcgatgcacgcatgcaacgagcgcggcacatcgctgcgcaacagcagtaattcggacacggaacgggcattcaacgcgttcggatacagctccgtgtacgcctcgaacgacgacaacgcacggagcagggcgctccactggtaataaccgcgtgccgacaaatcactgacttcttccgattcctcgccgaacatctcgtagcgcgcatccagcaaacgcagggtgttgtcggcgcgctcgacaaaggtgccgaggcgaatgaaccgataggcgtcattgcgcatgatcgtccccgaggtggcaccacgaaacaggtgcgaacgctgcttgacccagtcacagaagtggctgatgccatgtcgcgccaggccgccggcggcgatactgcgcatttccagccaggtggcgttgaggttttcccacatgtcggcggtgatgcgtccgcgtacggcgtgggcattgccacgggcggcgcgcaggcagttgtagatgctggcggggttttcttcgtcgagggcgaagaagtgcagcatgcgctcggcatccagctgtttatgccgctcaaggtagctgtccagggtgccgctgctgagcaacgacatggccagttcgtccagaccgtcgctgcgcccggcttgtggcatcaacgacagcgagtaactgacttcgagcatgcgcgccaggttttcggcacgctccaggtaacgggacatccagtacagatctgcggcggttctactcaacatactcagccctccaccacccaggtgtccttggttccgccgccttgcgacgagttgacgatcaacgagccttccttcaatgccacgcgggtgaggccaccgggcaccaggcgggtttccttgcccgacagcacaaagggccgcaggtcgatatgccgtggggcgatgccgttttcgacgaaggtggggcaggtggacaggctcaaggtcggttgggcgatgtaggcatgggggcgggccttgatgcgttggcggaagtcctcgatctcggcggcgctggaggccgggccgaccagcatgccgtagccgccggacccctgggtttccttgaccaccagttccggcaggtgggccaggacgtgggacagttcatcgggcttgcggcactggaaggtcggtacgttttgtagcaccggttcttcgtctaggtagaaacggatcatttccggcacataggggtagatcgacttgtcgtctgccacgccggtgccgatggcattggccagcactacgttgccggcgcaataggccgcgaccaggccgggcacaccgagcatcgactcggggttgaaggccttggggtcaaggaaggcgtcatcaatgcgccggtaaatcacgtccaccggcttggggccgtcggtggtgcgcatgaacaccttgaggtcgtgcacgaacaggtcggcgccttccaccagttccacgcccatttcccgggccaggaacgcatgttcgaagaacgcgctgttgaagcgccccggcgtcagcaccaccacattggggttgtccaggcggctggagctcttgagggtcttgagcagcaggttggggtagtggtccaccggcgcgatgcgttgcttggcaaacacctcggggaacaggcgcatcatcatcttgcggtcttcgagcatgtagctgacgccgctgggggtgcgcaggttgtcttcgagcacgtagtaggtgccatcgccgtcacgcaccaggtcgacaccggagatgtgcgagtagatgtcgcgatgcaggtccaggccgaccatggccttctgatagccctcgttacccagcacctggtccgcgggaatgatcccggccttgatgatgcgctggtcgtggtagatgtcggcgaggaacatgttcagcgcattgacgcgctggatgcagccgcgctcgatcacgctccattcactggcagggatgctgcgcgggatgatgtcgaaggggatcaggcgctcggtgtcttgttcgtcgccgtagagggtgaaggtgatcccggcgcggtgaaacagcaaatcggcttcgcggcgacgctgggccagcagttccggcggcgtattcgccagccagcgggagaagtcctgataatgcgcacggcaggcgccgtttgcgtcattcatttcatcgaagaaagatcgagccattccagtaccttgtcagtgccgagggacgcttgggtggcactgccgtttcaaaaaacgcattttttatgagcccgtggctaagggtgccactgggcctggtccttactttcttgtggggtcggctctgggtcggggggtaacgaatgctcctgtatccgggcagatgaatggataaagcaatgcctgtgccgaaaccgcgaatcttgtggtgagcgggcttgccacagaagcctgttcaccacagaaggccatcaccccaacaagcccgctcaccacaagagggcagcggcttgaaggtgccccgacttggtgcatgaacaaacttgaacttcactcgccaccgactcttctaacaggactcgaacctgctgggagcaccgtcgtgcccagaatcatctctccccatacgccggaagcggccctgaccgaccacagcgaacacaacgcgaagatcttcggttcgcccaaggaccggttggacttctaccggcgcgaaatccagtacgaaaccaccatcctggccaaccgcaccgacgcctacctcaccgcgcagtcattcctggtgatcgccttcgtctccggcatgggtaacctcaaccctgagtggggcaagctgttcaccctggtggtgccggtgttcctggtgatgctcggcgtgctcagctcgntaaagcaatntggtcgtggtagatgtcggcgaggaacatgttcagcgcattgacgcgctggatgcagccgcgctcgatcacgctccattcactggcagggatgctgcgcgggatgatgtcgaaggggatcaggcgctcggtgtcttgttcgtcgccgtagagggtgaaggtgatcccggcgcggtgaaacagcaaatcggcttcgcggcgacgctgggccagcagttccggcggcgtattcgccagccagcgggagaagtcctgataatgcgcacggcaggcgccgtttgcgtcattcatttcatcgaagaaagatcgagccattccagtaccttgtcagtgccgagggacgcttgggtggcactgccgtttcaaaaaacgcattttttatgagcccgtggctaagggtgccactgggcctggtccttactttcttgtggggtcggctctgggtcggggggtaacgaatgctcctgtatccgggcagatgaatggataaagcaatgcctgtgccgaaaccgcgaatcttgtggtgagcgggcttgccacagaagcctgttcaccacagaaggccatcaccccaacaagcccgctcaccacaagagggcagcggcttgaaggtgccccgacttggtgcatgaacaaacttgaacttcactcgccaccgactcttctaacaggactcgaacctgctgggagcaccgtcgtgcccagaatcatctctccccatacgccggaagcggccctgaccgaccacagcgaacacaacgcgaagatcttcggttcgcccaaggaccggttggacttctaccggcgcgaaatccagtacgaaaccaccatcctggccaaccgcaccgacgcctacctcaccgcgcagtcattcctggtgatcgccttcgtctccggcatgggtaacctcaaccctgagtggggcaagctgttcaccctggtggtgccggtgttcctggtgatgctcggcgtgctcagctcgttgaatgcctggccggggatccgtgcggcctacgagatcatcgaccattggcactacaaacagagtgaactgctgcgcagcgagccggtgatgggcctggcctacgatgagtcaccgttgttttccgagatggagtcgtcccacaagggctatcgcaagtcgctgctattctcaatgcgagcgccctggctgttcatggtgttctggctgttgctgggggcgtacgcgttctatattcaggtggataaccctggctcataaccgaggagagcgtcatggcaaacgactgcgaggaagaagaaccgaatgacccgggcaacgaagacccgggttccttgatggacgatgcaaccgtgccgttgattgaccaggagggtgacgctaccgagccgccggattgaagcctattcgatcaactgtttgccgatggttttcatccggatcatgtccatcaactgccgcagccctggctgcgactgccgtcggctcgggtagtacatgcacaacggctcgccctggcaggcccagtcgggcatgacctccaccaggcggccgtccttgagctcctgttccacgcggttggacaggcagtaggcgatgcccaccccttgcagcgccgcattcacaatagtctcggtatcagccgcgctgaagtggcccggcacgtcgatgcgttgctggcgggtgccgttgcccagttcccacttgtaggtggtcttgtcgcccaggtacatgcggatgcaggcgtgttgcagcaggtctttgggcacctgcggcgtgccccggcgggccaggtaggcgggcgacgcgaccacgatccagcgcagctcaccggtcaagggcaccgccaccatgtcctggggcacggtggcgccgtagcggataccggcgtcgtagccctcggcgatgatgtcgatcatctggtcctgcacgatcaggtccacgcgcagttgcgggtaggcggtgcagaagtccccgaggatcggcgccagcagcaataccgccgcgtcccgtggcacgttcaagcgtagccggccaatgggcgcgtcgcggtacaactccagggtgtcgaggccgtccttgatggtggcaaagccctgggtgagtttttctgccagcagcgaaccggcatcggtgggttccacggcacggctggtgcggtacagcagcttcacccccaggcgggtttccaggttgcgcatggtgtggctcaaggccgaggtggtaacgcccaactcatgggcggcgtggcgaaagctgcggcgacggatgatagccatgaacacgttgagatcggccagttcggaacggttgaaagcagccattttcaagcctcttatgcgggagttcggctgtatgcggcgttgagcccgattcaaccgtggatgacttagagtaattgtttttctaagcattattgcaagccacgagatattttcatgcgcgttgagaccatcagaattgccggcatcgaacaggcggtctcgcggatcgccctcggcacctggtccatgggcgggcacctgtggggcggcgcggacaccgagcaagcctcgcgcaccttgcggcacgcgttggcggtgggtatcaacctgatcgacaccgcgccggtgtacggctttggcctgtccgaagagctgatcggcaaggccttgcgcggcgtgcgccacagcgccgtgatcgcgaccaaggcggggctgcaatgggacaccggcgccatccggcgcaacgccacggcccagcgcattcgcaaagagctcgaaggttccttgatacgcctgggaaccgactacatcgacttgtaccaggtgcactggcccgatccgttggtagcccaggaagaaaccgccgatgaattggagcgcctgcgccgtgagggcaagatcctggcggttggcgtgagtaattattcctcggcgcaaatggacgatttcagccagtacaccgccctggccacggtgcagccaccgtacaacctgtttgaacgtgccatcgacagcgacatcctgccctacgccaaacagcattcgctggtggtcctggcctacggcccgctgtgccggggcttgctcagcggcagcatgcacacagccacgcgctttgccggcgacgatgtgcgtacgctcgaccccaagttcaagccgccacgcttcgagcaatacttggccgccgtggccgcgctgagtagctacgcccgcgaatgccacggcaagtcggtgctcgccctggccctgcgctgggtgcttgaccaaggcccgaccatcgcgctgtggggcgcccgccgcccggagcagctgaagggctatcaagaagccttcggctggcacctgacgcccgaagacctgtcgcatatcgaccgtatcctggccagcacgataaaagatcccatcggcgcggaatttttagccccgcccaagtgttgacccttcgacagggatgtccaggtttttgcatgaagcgcggcacctgatgaacccgctgtaactgtcagccccgtagaacaggtgataagcaccctgtggcgagcaggcttgtcctgcgttgggttgcgaagcagccctgaaacccgcggccgaagcgtgcctgactcagcgcattcctctttccagggtcgcttcgcaacccaacgcgggacaagcccgctcgccacagttgcagtgctcgccctccaagactttgaaagggctggttgtaaatgtgcggaaatcgccataacgacctctttggacgataaacgacaccgggccaaacatgcccattgaacgactgttcagtttgcactatgttgaccgcatccacccgtttggaaccgaacgggttagcgctttttcttcttgaacgagaggctctggcatgcggttttcccccttcgtcgaacgaattgcagggcagggcgtagccgcctgggacatccaccacgccgcgttccacgccgccagtcagggcgaagacatcatcattctcagcgtcggcgacccggatttcgccacgccgtcctttatcaccgacgctgccgtcagcgccttgcgcgatggcgacacccactacaccgaaatccctggccgcccggcactgcgcgaagcgattgcagcacgctacagccagacgctggcacgcccgctcgatgccgcaaacgtcatcaccgtggccggtgcgcagaacgccttgttcgtgacgtcgctgtgcctgttgcaggccggtgacgaggtgctggtgctcgacccgatgtacgtcacctacgaagccacgctcaaggccagcggcgccacactggtgcgcgtgccgtgttcccctgagtcgggctttcgcgtcgatgccgcgttgctcgccgccgcgatcaccccgcgcacacgggcgattttcttctccaacccgaacaaccccaccggcgtggtgctcaacccgcaggagctgcaagccattgccggcctggccatcgcccacgacctgtgggtcgtggtggatgaggtctacgaaagcctggtgttcgacggcgagtaccacagcctcgctgcactgccgggcatggccgagcgctgcgtggtgattggcagcctctccaagtcccatgccatgaccggttggcgcatcggttggctcatcgctgcgcccgcgctgatcgcccatgccgaaaccctggtgctcagcatgctttacggcttgcccggctttgtgatggaagccgccaccgccgccgtgctggcccatgatgaagtgacccagggcatgcgcgagatttatcggcgccgccgcgacctggtggtggccgggctgagtgcctgccctggtatccaggtgcgggcgccgcaagcggggatgttcgtgctggtggacgtgcgcggcaccggcctgggctccctggattttgcctggcgcctgtttcgcgaagcgggggtatcggtgctggatgcggcggccttcggcgagcccgcgcaaggtttcgtgcggctctcgttcaccctcggcgaagaacgcctggcgcaggcctgccaacgtatcgcgcagtttgtcgccaagctggccggtgagccacgtatcgccgccgcgcccagggttgaagtggcgcaacctgtcgcagccaggaagatgatcgaggtcatcgacctgcataagcgcttcggcaatatcgaagtgctcaagggcatttccctcacggcccacgaaggcgaagtcatctcgctgatcggtgccagcggctcgggcaagagcaccttgctgcgctgcatcaacatgctcgaagtgccggaccagggcagcattcatgtagacggcgaaagcatcaagctcaactacggccgccccggcgcacccctggtggcggatgcccggcagttggtacggatccgctcgaccttgggcatggtgttccagaacttcaacctgtggccgcaccgcaccgtgctggaaaacctcatcgaagcccccacccaggtattgcgcgaaagccgcgccgaggccatcgaacgtgcagaaagcctgctcgaccgcgtcggcctggccgccaagcgcaatgaatacccggcctttctttccggtggccagcaacagcgcgtggcgattgcccgggcgctggccatgcgccctaaagtcatgctgttcgacgaacccacttcggcgctcgacccagagctggtgggcgaagtgctgcgggtgatccgctccctggccgaagagggccgcaccatgatcctggtcacccatgaaatggcattcgcccgggatgtgtcgtcgaaagtggcgttcctgcaccaaggcatgatcgaagaaaccggttcgccggacgcggtgtttatcgacccacgcagtgaacgttgccgacagttcgtcaacgcgcaccaaactcgctaactccagaaaaagacggggcaacatcatgcaattcaaacgtatggcaacgtggttgagcagtgcagtgttgatgctggccgcaggtttcacctgggcggccgacaagcccatcgtgtttgcggtggcggccgaaccctacccgccgtttaccgtgaagggcggtaacggccagtggtccgggttcgaggtggacctgatccacaagctctgtgaaggcatgaaagccgaatgccagatcaaggaagtggcgtgggacggcatcattccctcactgctggcgaagaagatcgacgtgattttctcgtcgatgtcggtgaccgacgagcgcgaaaaacagatcgcgttcagccgcgcctactacgattccctgctgggagttgcggggccaaaaggcagtgaagtcgagatctccccggcgggcctcaagggcaaattgatcggcgtgcagatctccacggtcagcgccaattacctgaagaagtattacgaaaacatcgccgacctcaggtactacgacacccaggaatcggccaacgccgacctgatcgccgggcgtatcgactacatgatggccgacgacaccgccatcgccatgatggtcaagaccccggaagccagcggcctggcgcacatcgccagcgtgccctacgacccgatcatcggccgtggcgtcggtgccggcctgcgcaaggaagacaccgcgctcaaggcccggctggacaaggccatcggcgagttgctggtgagcaaggactacgacgacctgtcacagcactatttcggcctgtcggtcagcccgtgcaagcgcaccgataccccggcgtttgtgagcaagacctgtgacagcccgtaccagcaaatcgcccagaagaccgaataaccatgttcgaccttctcggtttcggcgaacaagggtggggccaggcgttgctcaaggggttatggatgaccctgcagatctccgccgggtcatttgcggtgggcttgctgatcggcctggtggtggcctgcgccaagctcagcgcgccgcgtcccatcgcgctgctgatgcgcggctacaccacggtgtttcgagcggtgccggaactgctgctgattctgctgctgtactacgccggctccatgggcctcaacgcgctgatgctgtggctgggcttcgcccaggtgaatatcagcggcccgctggtggcgatcctggtgctcgggctggtgcagggcgcctatgcctcggagattttccgcgcggcgatcctggcgatcccccacgggcagatcgaagcggcgcgggcctttggcctgagcgggctggggctgttccggcgggtgacgctgccgatcatggcaccgttcgccctggccggcatgtccaacctgtggatcaacctgatcaaggacagtgccttgatcagcgtggtcggcaccaacgaactgctgtacaccgccaagcaggcggcggggtcgacccgccaatacctgctgttctacctcgcggccgccgccttgtattacctggtgacgctggcttccaactacctgtccgggcgcctggagcgccgtatccgtcgctggatgccggttgtcgagtgaggcgcacatgcctgagtggataagctactacgccgggctgatcgccaaggggttgcagaccaccttgtcgctgctggtgatttcggcagtactcggttttgccctggcggtgctggtggcgctggcacggttgtcgcggcgcaagtggctggcgcgcagtgcgctggcctacaccagcgtgctgcgcggtacgccgttgctgatccagatctacattttctactacggcttgggcagcctgttcgcccagttcccgatgatccgtggcagcttcctgtggccgtatctgcgcgatggctactggtacatcgtgtttgccctggtgttgtcggtaggcgcctatgtcggcgaggtgattcgcggtggcctgctggcggtgcccaaaggcgagatggaagccgcctcggcgttcggcatgaccccacgccaagccttgttgcgcgtgcgtttgccacgggcgatgcgtctgttgctgccgaccctggccggggagacggtaatgctgctcaaatccaccgcgctggcgtcgaccattgccgtggtcgacctgctcggcgcggccaacgtggtgcgcgcgcagaccttgcagatctaccagccgctgctgctggtggcgggcgtctacctgtgcctgaccttcctgatcgaaggcgtctacgccatcgccgaacggcgcggtacgccgctgcgcaggtcggccggatgagccggtgtcacaggatgtgatcggcgctgaaggcaccgtgacgcaagccttgtacccagcagcggcagatgtgcaacccgttggcagggctgaaggtgccggggttgaggcagccctcgagccagagtccgtcgagcatcgccgataggccaatggcggccaggtggctgtcgtggatcagcaggctttcactgcgggccaggtcgtccaacaggcgttggatcagccccaggtaggcgtggtaactgttttcgtgggactggttaacgtggggcgagtggcggatcaggctccagaacaccacccacacgccgagcaggtcggggtccatgacccgtggcgagaacgaggcactgagaaacgcgtccagccgtgcggcggcgccgtcagccagttcgacctgttcccacagggcagtggtcagctcgttggccagcttgtggtaggtctcggcaatcagcgcgtcgatgctgccgaaatggtggttgagcaagcccaccgatacaccggcttcggaggcgatgcggcgcacggaaatcccggcgtgcccgtcgcgggccaggcaggtgagggcggcggcgatcagcaggtcgcggcgctcgtcggggtcggcacggcgcagtttgtgagggtcgacggtcatggacaggcctttgatggaaacaccacagcgctaaggttagttgaacgtatgttcaatctctagcggttaatgaatgagaggagggcaaggcatggcaaacgacctttcgtggcaggtcatcggcgacgccggcaacccgctgcacattggcgcctggcgcttcgaaggcgacggcagcgggccaagggtgcacctgcaggcgggtgtgcacgcggatgaaatcgccggcatgctggtcctgcatcagctgttgccacgcttgcaggcgtgtcaggaccaaggccgcctcaagggcagcgtcaccgtggtgcctcaggccaacccgttcggcatcggccagttccgccagggccgtttgctggggcgctttcatgaagccaccgggcagaacttcaaccgcgctttcgatcactccctggccatggcgcagccggcgagcaacctggcgcagtggcaaaaacgcctggtgcaactggccgctgaagccgacctggtgctggacctgcacaccgatgacgaagcgctgccgtacctctacatccaccgcagcttctggcccgaccagggcctggcgttggcggcggccttgcgcgtggacctggtgatcgtctgggacgagggcggcgatggttcctttgaagagaccatcatcaaccatgcatcgccgcaactggccgcgaccattgagctgcgcggccaggcggacgtcagcgatgcgctggcgcaacaggatgccgacggcctgtgggcgtggttgtgcatcaacggcgtgatcgacgaggtggccgccatcgccgagtggccaggggacgtggtcgacatgggctgcatggaaaccatcctcgcgccttgcgccggggtgctggtgttcgagaaagccctgggggattacgtggaggaaggccagcgtttcgcacgcatcatcggccgccccggtgacccgtgttccgaagtgatcctgcacgccgcccaggccggccgtatggtcacaggccaccgcgaacgcctggtggcccagggttcggtggtcgccaagttcaccgggacgcgcttatccgacagctacagcggtggcgtgctggacccgtagcggtgtctgtgtgggagggggcttgcccccgattgcggtggatcagctgtagatgagttgactggcctggtgctatcgggggcaagccccctcccacttttttaacgcagtgtgccattggtcgaagtgtgagcccaaccgcttcaaccgccgcatcgcactgtccagatgcgggctggcacagaaatgcaccacccaccggggcttgatcgagtgcctgcgtgcggaaatctcacggactctctaaacgctccagcaacaggcgctccagggtgtccaccggcagcggccggctgaacaggtagccttggatctgatcacagccggcctccttcaagaacgccagttgcgcctgggtttccacgccttcggccaccacccgcaggctgaggctgtgggccagttcgatgatggtacgggtgatcgccgcgtcctgcgggttgctggtgacttcgcggataaacgcgatgtcgatcttcagcgtgtcgatgggaaaccgccgcaggtacgccaggctcgaatagccggtgccgaagtcatcgatggagatcttcacccccatggcgtgcaggcgctgcaggctggcgatggtgtgctgggtgttttccatcagcgagccctcggtcagttccacctccagccaatgcggctcgaccccggtgcgggcaagggtgcgcgcaatatcggcgatcaggtcgccttcgatcaattgatggccggagacgttcaccgacacctccaccgcgcctatcgcgccgcgttgccactcggcgatctgttggcagacctgctcgatcacccaacgccccacgggcacgatcaagccgaggctttccaggatcggtatgaacactgctggcgataccgcgccgtattccggccgttcccagcgcagcagcgcttctagggcacagatgcgaccgctcagcacctcgaccttgggttggtaatgcaccgtgaagtcatggcgtgccaccgcttggcgcaagtcgttttccagggcctggtgggccaggtcatgcacgttcatgccgatctgtcgttgcgccaactcacgggagtggctgaccaggtcgccgcgttccttgagccgcagcaggttacgcacgcgcaaccatagctcgacacgttccaccggcttgctgatgaattcttcggcaccggcctgcaacccgctgacacgggcgctcggttcgctgagggccgacagcatgatgatcggaatacccgccgtggtttcatcgtttttcaactggctggcaacctcgtagccgtccatgcccggcatcatgatgtccagcaggatcaggtccggcggttgccgggccaccaactgcaaggcttcctcgccgctgctcgcgctcagggtctggtagccctcatgttgcagcagggtttccaggagtttgcgcacctggggttcatcatcaacgatcaacaacgttgcgggttggctggccatggagaggactcatgtgagagggcgggtgtgctgttgcaacaaggtatcgatcacctggtacagctctttgtagcgcagtggcttgatgatgtaggcgtcgcaaccggcgagccgggtcttttcgcgatcttctttcatcgccattgcagtcagggcgatcaccgggatgtgggccgtgagcgggtcgcgcttgagcagcgcggtggcagccaggccgtccatgccgggcaactggatgtccatcaggatcagcgccggttgctgttcgcgggccagggtcaggccggtctccgcatccgcggcccacagcacgtcgtggccagcattgaccagtaacaggcgcgccaggcgcatattggcttcattgtcttcaacgatcaggatgtgggccatgtggcctccggggcgcggtgcagcggcagccaggcaacgaaccgcgccccgcagccttcacggctggccacggcgacactgccaccatgcaggtcggtcagccgcttgaccatcgccaggcccaggccggtgccttcgaatttgcgtgccaggctgctgtcgatctggctgaacgccttgaacagcttgtccatgtccgcctcggcgatcccgatgccggtgtcgctgacgctgagttcgaggaacggttgatcagcgccgtcgggcagggcaaagcggtacaccggccagtcgccgggaatctggccgacctgtgcgcgaggcacctggcgcacggtcaacgtcactgagctgccgtgggcgctgaactttacggcgttggccagcaggttgtagacgatctgtttggtcttgcgcaggtccagctgtagaaggccgagatcgtcgggacactccagcttcaattggatgcgttgcaacgcggccttttcccgcacgatcagcaggctgttggccaacagccccgccagttctgcgttttccagttccagttccatcatgccggcctcgaccttggacaggtcgagaatgtcgttgatcaacgacagcaagtgctggccgctggtgaaaatgtcgccgatgtattcgcgctgggtctcgctcatgtcgccgaccaggccatccttgagcgcttcggaaaagccgatcaccgcgttcaacggcgtgcgcaattcatgggacatggtggcgaggaattcggacttcatatggctggcgtgctccagctccaggttcttttcttccagtgcccgctcgaaacctttgcgctcggcttcttcctgcttgcgcgcggtgttgtcggtgccgatcagcaggtagccgatgatggtgtcataccgattgcgcagggccgtcaccgaaaccatggccgacaggcgactgccgtccttgcggatgtaggtcagctcgtagatgtcttcgatacccctcgaggccttgaacaccagcgcttcgaagcccggcgtgatcggcgtatccagttccaggctgagggcggcggcgcgggtgatcagttcgacggggtcggagatatcggcgggggtgatgcggttgaccacatcggcggcggcatagccgagcatgcgttcggcgccgacattgaagatctggatcacgcctttctcgtcggtggcgatgctggagaagtacgcgctgttgaagattgcgtcttgcagggcgccggtcttgagcagggttttctgccgcttgaactcgacgatcttttcagcccgcgattgcggttgttcgggtaacggtgtgtccatcgctttggcgttccgtgacgttcaggcccgccatcatcgaacgacgatggcgcagagcatgctcacagaagatcgcttgagggcgacgaggaggagatgaggtacttggacaatagcagagattatggctttttgatggcgggccaacggctatcccacttcaaatgaatatcttcgggtcaaattggctgcttttcggattaacggctgatgaaacgtttcatctgtcgacaaatgagcaacgcaagcgcttgcgtaaggaaatgtttctacattagagtcgacccactgacgacaaaaataataaaaccaggagctcattcatgagccttgaacccttgcttgaaatgcagggcatcagcaaaaccttcaacggtttgcgcgtgctcaagaatgtcggcctgaaggtctaccccggcgaaatccacgccttgatgggggagaacggcgccggcaaatcgacgctgatgaagatcctctcaggcgcctaccaggccgaccccggcggtgaaatccgcatcgccggccagcccgtccccacattcgaccccgccaccgcaaaaaccctcggcatcgccgtgatctaccaggaactgagcctgtgccccaacctgagcgtggccgagaacatctacctgggccgtgaactgcggcgtggctggaccatcgaccgcaagggcatgcaggcggggtgcagcgaagtgctgcaacgcctgggcgccgagttcaccccggccacgcgggtcagcagcctgtcgattgccgagcgccaattggtggaaatcgcccgcgccttgcacgcccacgccaagatcctggtgatggacgaaccgaccacgccgctgtcctcccgtgagaccgaccgcttgtttgcgttgatcaaacaattgcgcagccaaggcctggcgatcatctatatcagccaccgcatggccgagatctacgagctgtcggaccgcgtctcggtgctgcgcgacggccagtacatcggcgaactgacccgcgaggcgctatcggccgaagtgctggtgaagatgatggtgggtcgcgacctgtcagggttctacaaaaaggagcacgccgcctataaccccggcaacgtggtgatgcgcgtgcgcgacatggccgatggcaagcgcgtgcgcccgtgcagtttcgacctgcatgccggtgaagtgctgggcatcgccggcctggtcggggcagggcgcaccgaactggcgcgcctgatcttcggcgccgacccacgcacctcgggcaccctggaagtggtcggcaagacagtcacccaactgcgtaccccggcggatgcgatccgcgccggcgtcgtctacctcaccgaagaccgcaaggcccagggcctgttcctggacatgagcgtggcggacaacatcaatgtctgcgcctgcgtgccggatgcccatgccggcggggtactcgatcgcgcccatgccgcgcagcgcgccacgcaggcgatcaagtcgctgtcgattcgcgtggcctcgggcaaggtcaatgtcggtgcgttgtccggtggcaaccaacagaaggtgctgctggcgcgcctgctggaggtcaagccgcacgtgctgatcctcgatgaacccacccgtggcgtcgacatcggctccaagtccgagatctaccgcatcatcaaccaattggcccaggccggcgtcggcatcgtggtgatctccagcgagctgccggaaatcatcggcacctgcgaccgcgtgctgatcatgcgtgaaggccagttggtcgcagaagtcggcggcgcctccggcgacgcaatttcccaggaacgtattattgacctcgccaccggtggcgatcaggtggtggcccatggctgaattgaatatcgcaacaaccggtaaggcagagcgcgcccgcgagctgatgcgcacggtcggcatgttgccggtgctgatcctgctgctggtgggctttgccctggccagcgagaacttcctgacggtacagaacctgtcgatcatcacccagcaggcgtcggtgaacgtggtgctggcggcgggcatgacctttgtgatcctcacggcgggcattgacctgtcggtgggtgcgatcctcgcggcgtcggcggtggtggcgttgcaggcgtcgatgtcgccgcagttcggcatgttcgggattgccgccggtatcggctttggcctgttgctgggcctggtcaacggcgggctgatcgcctttatgcgcctgccgccgtttattgtcaccctcggtgcgctgacggccatgcgcggtctggcgcgcctgttggcggacgacaagaccgtgttcaacccggacctgccgtttgcctttatcggcaacgactcgatcctcggtgtgccctggctggtggtgatcgccgtggcagtggtggcgttgtcgtggttcatcctgcgccgcaccgtgatgggcgtgcagatctactcggtgggcggcaacccggaagctgcgcggctgtcggggatcaaggtgtggaaggtgctgctgttcgtctacgccatgtccggcgcgttggccgggctgggcgcggtgatgagcgcgtcgcgcctgttcgccgccaatggcctgcaactggggcaatcctacgagctggatgcgattgccgcggtgatcctcggcggcaccagttttaccggtggtgtcggcaccatcggcggcacgctgatcggcgcgctgatcattgcggtactcaccaacggcctggtgctgctgggtgtctcggacatctggcagtacatcatcaagggcatcgtgatcatcggcgcggtggcgctggatcgttatcgtcagtccggtgcacggacctgagttcactccaacaacaatcacaagagagacccgcatgaacctcaaacgtatctttccggtcattgccttggctgccctgatgtcccaagccgtcgaagcccgtgagttgaaggccctcggtatcagcatgggctcgctgggcaacccgtatttcgtgaccctggccgatggcgcaaccgcccgcgccaaggagctgaaccccaacgtcaaggtcacctcggtgtcggccgactatgacctgagcaagcaattctcgcagatcgataacttcatctcgtccaaggtcgacctgatcctgatcaacgccgtcgacccgtccgccatggcctcggcgatcaagaaagcccgggatgccggcatcgtcgtggtggccgtggatgtggacgccaagggcgtcaacgccacggtgcagaccgacaacgtcgaagccggcaagctggcgtgccagttcctggtggacaagctctccggcaagggcaatgtgatcatccagaacggcccgcaggtcaccgccgtgaccgaccgggtcaaaggctgcaaggcggcactggccggcgcaccggagatcaaggtgctgtctgatgaccaggacggcaaaggctcccgcgaaggtggcctgaacgtgatgcagggttacctcacacgcttcccgaaaatcgacggcctgttcgcgatcaacgacccgcaagccatcggcagcgacctggcggccaagcagctcaagcgcagcggcatcctcatcacctcggtggacggtgcgccggatatcgagaacgcgctgaagaccgacacgcagatccaggcgtcggccagccaggacccttgggccatggcgcagaccgccgtcaacgtgggcaacgatattctcaatgacaaagccccggccgaagcggttaccctgctcacgccaaaattgatcacccgtgacaacatcgcaacgtacagcggttggtcgagccaacattgattcattgagaggaacagcgccgtggtcaccatggatgacgtggcaagcagggcgggggtgtcgacgtcgacggtgtcccatgtgttgaacggcacccgcaaggtcagcccggcaacggtgcacgcggtgcagcaagcgatccaggcgttgggctacatccccaacaccctggcgcgttcgctggcacggtcaagcaccagcacgattggtgtggcgatttcggcgctgtccaaccattacttcagcgaaaccgtgcacgccattgaaaacgagtgcgccaagcacggctacatgatgctgtttgtcgacacccatgacgacccggagcaggagctacgggtggtcacggcgctgcatcatcgacgggtcgacggcatagtgctggcgccctccaacggttccaaggccctgcagtacctacgggacaaccagatcccggcggtgttggtggaccgcatgatgagcgagcaattcgaccaggtcggggtggagaacacgcagtccacccaagccttggttacccacttgattgaacacggccaccggcgcatcggctttatcgccgggcgtgaggggttcagcaccaccgatgagcgggttgccggataccgcgcggcgctgcacggcgcggggttggcgtttgatccgcagttgctggtcaacggcggctccaatactgcgccggcgcgccaggcgacggtgcagttgctgggcctggcggcgccacccacggcgatcatggccggcaataacctgatgaccctcggcgcgatgcaggccctgcgtgaggcgcagatcgacgtaccggcgcaaatggccctggtgggttttgatgattttgactgggcggattttttcgtgccgcgcctgaccctgatcgcgcagccggtccaggcactgggcacgcaggcagtgaacctgttgttgcagcgcatggcgtcgcccgacgcacccgcccacagtgtgcgcctggcgccgactctgcaatggcgtaattcatgtggctgtaatggattggaatgacccccttatgagcagtcccgtttccctcggcatcgacctcggcacctcggaactcaaggccatcctcatggatcttgacggtacggtgctggcccatgccggcgtgcgcttgagtgtgtcgcggcgtcacagcggctggtccgagcaggcgcctgaagattggtggcaagcgtgcctgcaggcgctggccgaattgcgcgggcatcctggatttgcccgcgtggcctgtatcggcctgtccgggcagatgcacggcgcggtgttgctgggcacggacaaccgcgtgttgtacccggcgatcctgtgggacgactcccgtgccatcgccgaggccgaagagttgggtcctgcgtttgccgacatcaccggcagcctgcccatggccgggctgacggcgccgaaactgctgtggctgcaacgccatgagcccgaggtgttcaaggccattgattgcgtactgtcgcccaaggattacctgcgtttgcgcttgagtggcgagcgcatcagcgagatgtccgatgcagcggggacgttgtggctggatgtggcgcaacgtgagtggttcgcgccgatgctgcgggccacgggcctctcgctggagcagatgcctcggctggtggaaggcggcgctgcgagtgccgtgctgacggcgcaaggccttggcttggcgccctcggtggtgattgccggcggcggtggtgacaacccggtggcggccgtggggatcggggcgatcaatgccggtgatggcttcatcaccctcggcaccagtgctgccattgtcgcgattaccgatcacgccgccggtaatcccgcgagtgccgtgcacagcttctgccatgcgctgcctgatcgctggtacaccatgggcgccatgctcgccggtgccagttgcctgcgttgggtcacgcggcttacgggaacggcggatgagcaaaccttgctggaccaggtgcaggcgcagttgccgatcgaacagccagtgtcacttagtacgccgttgttcctaccgtacttggccggtgaacgcaccccgcataacgacccgctgctgcgcggtggtttcatgggcctgggccatgactgtacaccggcgatgctcggttatgcggtgatggaaggcgtggggttcgggctgttggatgcgttgcgtgccgtgcaatcaaccggtgccgacgtgggcgcctgcgcgttggtgggcggaggggcgcgcagtgaatactgggcgcagttgctggctaatatcctgcagcgggacatcttcaccctgcatggcagcgaattgagcgcgtgtatcggtgcggcgaagctggggtttgtggcgatagagcagggtgcacaattgctggcggcggggatgccggtcaaggtccggtatagaccagatctgatgcagcagccggtgttggaggcgcgttatcgcaagtttcaaggtttactgagcgcggccaaggcccttcacgagtagccttttgtagtgagcgggcttgtctgggtggcctgttttggtgaactggcctgttgtggcgagcgggcttgccccgcgttggggcgcgaagcggcccctttcagcatcaccgcgcttctccagaatttggggccgcttcgcagcccaacgcggggcaagcccggttcgctccccacatcaggacccacaacaagctgctgccgctagtcgcccaagggcggcagacgccgtttcaccggagttttcttgacaatggccgtgttggtttcagcgtaggcgttgagccggtcaagcaggctgtccaggtgatccatggtgcgcacatgcaggcgtgcgatgaagcaatcctccccagtcaccttgtcacactcggtgaactccggaatcgcctggatctgccgctccacctcatgcaatttgcccggcaacgggcggatgcgcacgatggcttggagcagataaccgaaatgcctggggtcgatgtcgacggtgtagtgggtcagcacgccgcgctcttcgagacgccggaggcgttcaccgacgctcggcgaagacagcccggtaatcccggccagggccttgagcgacaagcgcgagtcgtccattaaagcagcgatcagttgctggtcgatggtgtcaatcatggtgtccgcctaattaataaaggcaatccaggtgtctagccttttttaggcgctggagccagtctcaaccagattgccataattgagcctcacttgaggagcctcaatcatggatacatccatccgtcgcgggtcgtgggaaatggtcgccgccatgctgatctcgggcaccattggctggtttgtcctggtctccggcgtgtcggtgatcgaagtggtgttctggcgctgtgtgatcggcgggctgacgttgctgttggtgtgcgcgttgctcggttatctgcgtctggacctgatcagctgggccaagctcagcctggcgatgctcagtggcgtggcgattgtcggcaactggttgctgctgttcgaatcctattcccgcgcgtcgattgccatcagtacggcggtgtacaacgtgcagccgttcatgctggtcgtgctcgccgccgtgtttttaggggaaaagatcaccgtgcagaaactcgcgtggctgagtgtggcgttcctgggcatgttggcgattgttaccgcccatggtgatcaaacaaccggcgacgattacctgaccggcatcgcattggcactgggcgcagcgttgctgtacgcgattgccgcgctgatcatcaaacgcttgaaagcagtgccgccacatttgatggcgttgatccaggtaaccaccggcgcgttgttactggcgccgctggtgccttggaacagcttgccggctacgaccagcgcctggggcgcactggtgacactcggcgtggtgcacaccggcgtgatgtatgtgttgttgtacggcgcgatccagaaactgccgacagccctgaccggtgcactgtcgtttatctacccgattgcggcgatcttcgtcgattggatcgccttcgggcatcgcctgggctggctgcaatggttgggggtgctggcgattctattggcggcggctggattgcaacgcggttggtggtggcgattaaaaccgaatgggtggactgaggacgcttgaaccgcgtttattcactcaagtcgagggaacgagttcctacgcctgcgccacacatggagacaactttaagacgaagcgtactgcccgttttagcgaaaactctctcccgtgatgatgaaagatgaaatccaacttactcagctctccgacgcataaatctctggcaacgcagattcaacaggagtcgcaacccacgaataaccgtcatcgacgcgaggtggaatcccctgccgttcgaaccgaaccaggaccaccggaagtagcgcagcctaaatccggaggtatttccaagcccaacgttacatcaagggagtcctcatcagagctccccaaaagctcaatgcgttgggtgagttatcaacacggtgtcaatcttgccgacgcgctggaacctggttcttcgaagcgaatgactcaggaagaactgatcgccctaccggaaaaaatgagcgcagcggccgttacacctgagcaagaagagttgattgctgcgacacgcgttggtcctgcgctggagtgggctgtagctaacggagtccttgaagaaaaaaccgattactcacaagcggaaattcacgaggctattacggcgctgaatctccatttcgaaaaaatggcgaatgcagtcagcacgctgaccacgcctatgccgatgagaaaaaattacttcatcggtacacaactcgtatcgcccatcaagggccatgccgatccggataatccaaaatacccggtggcgctctatgatgacaaaaagtttgcggaagactttaaagttgatctagcgtccaaaaaagccgcttatggcacgatcatccaacagttggtcgctacgcttccattgccggatcggatagccatcgggcagggtgaagtcgaagtgtacgcaatgaaggcgccgggagagggcggtgagcttgaacgcaccgaattcttgattaaaacggttcacaagggaaagacaacggtttatcaaattgcccctgaacggggaactgccaccaagcgtgatgacttcatcaaactcttcaacggcaacgacgttatcgggaagcaaaaattatccgatggcagttattccagtgtgttcactgcttgggaaaggccgaatattcaagacggccggtatcagccaagggtggatcaccgacctggcgcggcattggacaatacgcctttttcagcacagcttcatacgttggagccgctggcgaaatggcctgcggcaccggaagacgcagagggaagcgccagcccgcaggcatccttcttagagcgaagcaatcagatcgggaccgccgtatcccaaaaactgttttatgcgaaggacctggatttgctgctgatggcggaagaagacccggagcgggtcaccgaatccgaaaaaaaggacagggagaactatcagactttcaaagaggacagggagaaacgtcgccaattgctcaaaggttttgtgcctttctggcgcggaatcgaggcaattattgacggtcgcccaatcgaagggatcgcacaaatatggatagatatcctgacattcatgatgcccgttgaaaaagccgccgcaggtgtagtgagggccggtttccagatgattaaacgcgtgattccaaagtttttgaaactgtcgacaaacttcgccagctacaccttcaaaccgggtgttgcaggaattaaatgggaaggtggcgtgcaggggctgaaatggacatcgagcgcttccaagggggcagccaagggggcagaacaattcaggggcgctatggctaccatacctctgacccagccgggcgttagagaaattgagttgggaggtatcaagtattttgttgccgcaaagcctgacgcaggggatggcgtccactacagtctgcgagtggtgagcccggatgactcgacgaagctaatcaatagcgggaaagttgccaagcctgatgaggcaggtgtttggaaaatgcccgaaagggcgggtcgagatgtaagcggcgcgcccatgacgcagatgaaggggacaatgcaagagctcggtgtcctaggcggtgaaatacatacgtttacggatatctataagggcgagacacggctgaatgttgtcgcgcatggcatagaacggagccctgcggaagtagcggcgggcgttccttctaaagtgatggttgatggcaaagcttacagcgcaaaagagttggttgcgtatttgaagacacagggtattgatcccgcaaatccgcgctataaaaatgtccggctgttgatatgttatgcggcagacggcggaaagcattcgtttgccagcgattttcaaaagattgtgggtaaacctgttaaggcctttgaaggaaccgtcaccacgtcgcatggcgcgacggccatggaatatgttcgcaaagagttaataaaagacatgcgcgccttacatccagacttggatgacaacggtatcgaacttttggtccaagccgagatagaaaaactctttagtcaaaagtccatcttcgtcaacaaagccgacggcaccctcgtgcaaatacaaacggcgcctcagggcgccaacatcggtgagcatatacttaggattgaatataaaccggtacatttcacccggtgacgctcttctctcactgacgggccgctttagaacaaggcggcgtatcattaaaaactgccgtttgtaaaagcgaacgtgctcaccgactttttgtgagcacgctctcctatacgttggggatcagtgcgtgccctggaaaataatgttttccgggttgaagtgctccaccgcgctgcccggctgcggcaagccgaggatgtggcccttgatcttgcccaccacgtgcatctcgcagggtttgcagtcgaacttcagggtcaacacttcatcgccatggatcaactgcatcggcgccaccttggtcttcacgcccgtgacgcccttggcctgtttagggcacaggttgaacgagaaacgcaggcagtgcttggtgatcatcaccggcacttcgccggtttcttcgtgggcttcgaaggcggcgtcgatcagcttcaccccgtggcggtggtagaagtcgcgggctttctggttgtagacgttggcgaggaacgacaggtgcgcgtccgggtacaccggcggtggcgttgtttccgccttgcggccaccccttgggtgcgcagccacgcgcgcggcggtcagcgcttcgatcacttcacggcgcagggccttgagctgtgagttggggatgaagaacgcctgcggcgcatccagttggatgtcggtcgcgtggtattcggtggtgcccagttggccgagcaggtcgcgcagggtgtccagcgcctgttccggtttgttggccacgccgaacgggccgggcagggtgacgctggcgctgataccttcttcgctggtggcggtgacttccagctgtgcttcgcgcagacgtgcggcccaggtcaggccgatacggcgctcggatgaggtcttgagcagcgcctgttgccagttgtggtcgaggttgcggttcaacgggtgattcgggcgcagctgatgcaggccggccggcatttcattcggctcgacgcggtagcggtagcgcttctcaccgtcttcctcgaactcgcctttaggctcggcgatgttggcgcggaaacccaccacttcgcgcttgaccagcacattcaggccgtcgccattggacagcggctcatgggtgaccacttgcaggtcacgcttgccggctttttccaccacacccaccggcaggccggtgaaggtcggggtgtcgaaggcgccgatgtcgaccttgcggtcagtgacgaaatagtcggtgctgccccggtggaaggtcttttccgggtcgggcaggaagaaatgcgcggtacggccgctggacgcgcgcgccaggtccgggcggtcttcaagcacgtcatccaggcgctggcgataataggcagtgatgttcttcacataacccatgtccttgtagcggccttcgatcttgaacgaacgcacgccggcttcaaccagtgcgcggatgttggcgctctggttgttgtctttcatcgacagcaggtgcttttcaaaggccacgacgcggccctgatcgtctttgagcgtatacggcaggcgacaggcctgggagcagtcgccacggttggcgctgcggccgttctgcgcgtgggagatgttgcactgcccggagaacgccacgcacagggcgccgtggatgaagaactcgatggcggcatcggtttcgtcggcaatggcgcggatctcttgcaggttcagctcacgggccaataccaactgcgagaaaccggcctggtcgagaaacttggcacggcccagggtacggatatcggtctgggtgctggcatgcagctcgatgggcggaatatccagctccatcacgcccaggtcttgcacgatcaacgcatcgacgccggcgtcgtagagctgatggatcagcttgcgcgcaggttccagttcgttgtcatgcaggatggtgttgatcgtggtgaagacgcgggcgtggtaacggcgggcgaattccaccagctgcgcgatatcgctcacgtcgttacaggcgttatggcgcgcgccgaagctcgggccgccgatgtacacggcgtcggcgccatgcaggatcgcctcgcgcgcgatggcgacatcgcgggcagggctgagcaattcaaggtggtgcttgggcaaggacatagtttttttagtcaggcttgtcacggttgaggcgcgcattgtagctgtgaaatgcctgaccggcacccactcaggcctgagctgccatcgccgtgacttccacgcgcatgccgtcgaccgccaacgcagctacgccaaccgccgcgcgcacgggccagggcttggcgaagaagcgtttgtagacttcgttgaaagcggcgcgatcggccatgtccgtcagataaatggtcaggtgcatcacccggcccatggaactgccggccttctccagggcgactttcagggcttgcagggtgcattcgctttgcagggtgatatcgcccagttccaggctgccatcggcgcgggtcgggatctgggtggacaccaggatgccgttgaagccgatcacatccgaagaaatcgagtcggcatcggggtcaggggtgtagtgcaggtcgtggttggccatgggcgcctcgcgttggcaggttcagaaaggcgcccatggtccccgaaaatcaccgcaggggcaaactacgcccagcggcggaacagcacgctggcatttacgccgccaaagccgaaaccgttggacagtgcatagtcaatcggcatcggccgggcagcaccgcgcagcatgtcgaggccgtcggcgagggcgtcggggttttgcaggttgagggtgaccggggcgatctggtcgcgcagggcaagcacggtgaagatggcctcgataccgcccgccgcccccagcagatggccggtggcggatttggtcgaactgatcgccgggctgccgtttgcaccgaataccgtcctgatcgcggccaattcgcctttatcacccaccggcgtcgaggtggcgtgggcattcaagtactgcacctggtcagcgtcgatcccggcctgacgcaaggcctgctgcatcgctcggcgtgcgccgtcgccgtcttccgggccggcggtcatgtgataggcatcggcactggtgccgtagccgaccaattcggcaatcggctgcgcacctcgggccagggcgtgctccagctcctcgatgaccaggatgccggcgccttcgcccatgacgaagccgtcccgcgcctggtcgaaagggcgcgaagcctgctccgggctatcgttaaagtcactggacaacgcccgcgccgccgcaaacccggcaaggctgacgcgatggatcgctgcttcggcaccgccgcacacagccacatccacttcaccggcgcggatcatgcgcgccgcatcaccgatggcttgcacacccgctgcgcaggccgtcaccggcgcacccagcgggcctttcaagccgtagttgatcgacacatgcccggcggccatgttgctcaggaacgacgggatggtgaacggcgacaaccgccgtgggcctttgctgtcggtggtgcgtaccgcgtcggcaatcgccgggaagccgccgacacccgaggcgatgatggtcgcggtgcgttcctgcgcttcgggcgtgctcggcgcccagccggcctgcttcaaggcttcatccgccgccgccagtgcgaacaggatgaagcggtccatcttgcgctgttccttggctgccagcagtcgatcagggtcgaacccggcgtctggatcctgctgcacgctctgcacctggccaccgatgctcacggccaggtctccgatcaggtcttccggtaagcgacgaatacccgactgcccggccagcaggcgttgccaggtggattccacgtcagcgcccaatggcgtcagtgcgcccatacctgttacaacgatgcgtttactcatgatcaatcgactccagttgcggtgaaggaacagaccttatggacgtcactatcatcatgaaagtaacatggcgtcacgcacattggcactgacccacaggaatccccatgcaacgcaagtccctcaccagcgacgaatgccccattgcccgcagccttgagcgggtaggggagtggtggagcatcctgatcatgcgcgacgcgttgcagggcttgcgtcggttcgatgagttctcgcgcagcctgggcatcgcaccgaatatgctcacgcgtcgcctgagtgccttggtggaggcggggatgctggagcgccgcgcctacagcgaacgaccgccgcgctacgaatatgtgccgacggccaaaggcgaggatttccgtatggtgttgatgtcactggtggcctggggcaatcggcattacgccgaggagggcaccagtgtcgagttggtggagcgtgaaacgggcaggccggtgcagcccatgttggccagcgcggatgggcaagtggtggggtttgaccagtgcaccttgcagcccggtccggcggccagtacgggcatgcgcgaacgtcttgcgtggctcgatgcaaaaccttgatcgcacgagtatttgacgccagaaaataatcccctcaaggcccgtaaagtcacgtattccgcagccgatagctcatcaagacacagggtttttccgcacggctgagggcacgtcatgttcaataaatcactcaaaacagaactggcggccaggacggccgaagtcaccgagtacaaaggactgatcagtgcactggagcgctccatggccgtggtcgaattcgacctgaacggcaaagtgctgcgggccaacgacaacttcctcaagatcctgggctacagcgccagtcaactggccggcaagtcccatcgcgacttttgcctgccggcgctgaccagcagcccggcctacagccagttctggagtgatttgaaagccggcaagtttgtctccggcacgttcaagcgcgtggatgccaacggccggaccctttggttggaagccagctacaacccagtgctggacgagcgcggccaggtgctcaaagtggtcaagtacgcgctggacgtcaccgcccaggtggagcaggacgcggccacccgcagcaagttgacggccgtggaccgtgcgatggccgttatcgaattcgatctgagtggccaggtgctggacgccaacgcgaacttcctcaacgtgatgggctacaccctcgcggaaatcaaaggcaagcaccaccggttgttttgcgagcctgcgctggtcagcagccatgagtacgccgatttctggcgtcgcttgaacaacggtgagttctttaccgggcaattcaagcgcctgggcaagcacgggcatgtggtgtggctggaggccagttacaacccggtgtatgacggcgacggcaaactgatcaagatcgccaagttcgccagcgacatcaccgagcgcgtggagaaattcgaggaagactcccgtggcgcctcacgggcgtaccatatttcttccgagaccgagcgttttgccgagcatggcacccaggtgatccaagagaccgccacggaaatgcgccgcatcgccgagaatatcggcgcctctgcgcggctggtggggcaactgggcgaccgttccgaacagatcaccgccatcgtcaacaccattcgcggtattgccgaccagaccaacctgttggcgctcaacgcagccatcgaggcggcgcgcgccggggaccaggggcgtggcttcgcggtggtggccgatgaggtgcggcaactggccggacgcaccagccgctccacggcggaaatcgccgagatgatcggcatgatcctctcggaaacccgcgacgcggtgaccagcatgaacgcgacccaggaaggcgcgcaacgcggcgtcagcctggccgatcaggcgggttcggtgatcctgcagattcgcaccagcaccagcgatgcggtgcaggcggtgagcatgttcgcgtcgaaactggatgagtcggaagtcatacccaagactgcggtcggctgggtaggctgacgctctccatttggaggagcgagcaagctcgctcctccagtgggccttgtttagagcagggtaaacggatagtcgacgatcaaccgcagctcgttcaggtcaccatcgcgctggtcggcattcgatgccacgatcgcatcacgcacacgcaacgacagattcttcgccgggccactctggattacgtacttggcttccaggtcggtctcgtggtgtgcgccatccgcaccgtaattaccgacataggcgctatgggccggcgtgtgggtgccatcgatatccgagccgttgatatagcggcccatgaaactcaaccccggcacgccataactggccatgttcaggtcatagcggataccccaggactgctcgcccgggccgttgaagtcgttccattgcaccgagttggccaggtacaccgaatcgccgccttcgccggcgccgttgttgccggtgccgatgtagtcgaacggcgtgtcgccatgcaccttctggaacgacagcgtcagggtgtgcgcctgcaggaacgagtaagccgccgccaccgaataggtggtgttgttgatcgccccggccttggcgctgccggtgtcgagggtgcggtacaggttgccgtccagcgccagggactggtcatgccccaacgggattacgtagttgaggttggtgtagtactggcgccagatatcttccagctcaccggcatacagcgtggcgctcagggacgggctgaagctgtacttgccgccgacgaagctggcgctgttggcggcgatgttggcgtaggtggcgtagatatcgtggtcatggttgctggtcatgccactgttggtgctggtgaaatgcccggcttccaggtccaggccggcgatttcgctgctggtcaggtcaaacccggtggcggtctgtggcaacaggcgcgtgccgccggtggcgaagaccggggcggtgggctgcatgtcgccgaatttgagttgggtcttggagactttgatcttcactgcggcgccgactgagccgtaggcgtcttcgggatcgccatggcggtcggtcggcaggttgccggtgccggcgtccgcatgggtggcatcgagtttcagcccgccgtaggcataggcgtccacgccgaagccgagggtgccctgggtgaaacccgaggcgtagttgagcattgcgccctgggtccagtcgatattatcggcccggccgccttcacggttgcggttcatgtagtagttgcgcaacaacccagtgacgctgctgccctcgacaaatcccttggcatccgcctggtcgctgaccgactcggcaaaggccatctggctgataccggcacacaccgccagtgccaataggctcgactgtttaatcatgttgtgacttccccggaataatgaacgcgcgcacagaaacaccgcacttatcgaatggcgcataacgttgtttgggcagatgtttgcaggtgagctgttacggttttttattgtgttcggcgtggttgccgaggtggattccaggcacagtctgcgcggccgccagcgggccaagggatgaaactcaattaattaaacttcacgctgtttaatttctttcgggtgtacgttgaacctgtcttagccgctctgcttcgacaacatcctttggttgccgccgcaggctctgcggcggattttttcacaacatttcacaagccgggtttcatcccttcggcatcggtgcatcagtggcttgcaaggcgcgcgacgtcgacccgataggtcggcctgtcatctttcagtaaccctcaaggtctttgctctcctgaccggcccgacatgatcgcccatgacgatcatgcactggcccccgtcatcaaggagcacgcgcatgtcagcaccggtcagcaatgcacccgcgatcaagactgtcacgaataacgattccagcgccgaatggggtaacgcggtcgatcgggccaaggccaaggacgccggtatcgaatggcagcgccccaaggatgaccaccgctcggcccaagacatcatcgacgatagcccgctgctgaagaacctcggcaaccagagcggagtgaaggacaagttgcgcgaacgtgtcggtgattttgagcacgatgcggacgcggcttatcgcgccaaccaggtgctgggccacgtcgagcgcttcgatgaaaacggttcgcgcctggctggcaacacgatcgacaatggtcgcgtggacggtttcaccaagggcggcgatgccaagcacggcaccgaggccgggcgccttcaagacttcggcaagtatggctgggagaacctcaagggcgagctgccgcacgcggacacggtgggccaggacgataagcgccgtgaggcggcggacaaggctggcatcgtctgggtgctgccggagggcgacaagcgttcggcgcaggacatcatcaatgacaacccgttgctgaagaaccttggcaaccagagtggggtgaaggatgcgttgaaagagcaggtcggggacttcgacaaggacccgaacgcggccttccgtgccagccaggtgctcgaccgggtggtgggttatgacgagaaaggcaacgcgttgacaggcaaggatgtggccaacagcagtgtcgacggctttaccaagagcggtgaagcgcgccatggcaccgaagcggggcgcttgcaggatttcggcaagtacggttacgaagcgctgggcaagcccccgtccaacgaccagatcggtagctacaaagactttctcaagacccatccggaggccgacgcaggctccaggcagatcgctcagtacggcgcgatcctggatgccaagttcgattcgatccgcggcaagaccggcggcgatggcgctgtcaccgaacagaatatcaaggactacctcaagcaaaacccgcaactgagcaaggacgagaaagaggcgctcaacttcttcgcccagcctggcgccttccgcaagctcgacaccgccggcaacagtatcggtgataagcccgacggcaaggtcagccgcgacgacgtgcaggcctggctgaagacatccgcacccaccgatgcccggagtctggccagcctgatcaccgacgtggccaccggtaacctcacgggcaaggtcgccaccagcaagctggacaaggacatcttcgagcatccggaaaagtactcggccgagcagaaggccgcagtgctgctggaactgcaggagacgcagaaacttgtggtcgacggcgccaacgccggggtctggaacagcgactatggcaaggtttccatcgccaaccgctcgggcgcgatctgggagccgcaaaagctgctgcaagacatcaacgaccacatggccatcttgcagggcgacaagccaactgccgagtacatcaagaacgccggcgaccaggcggtgaagaccctgtttgaagagaatcccggcctgaaggacgccgttaccaagacctatgaggaccaggtcaagtccggcaaggccctggacgccgcgtgggacgccaacaccaaggacggcaagaccgaccagcacacagcgctagccggtttctacgccaccgccaccagcctgcagtcgattctgggtatcgacgatgccaaggcgatccagggcgcggtcgccaaatccacgcataacgaagacttcaagaccttctacaaggatcagttggccagtggcgaccgcctgcgtgagttgctcaagcacaacacgcccgagcaggccgcctcggagttcagcctggaagtagcgctttataacgccgcgctcgatccggccttcacggcccagcacgaccaacagctcaacgagaatttctccagcatcgcccaggataacctgttcaagggggctggcttcgacgacatcaagaccgctttcggcaaggacggcggcgcggagttggacgaagacaaggtccgcacgttgatcgaccaaatgcgcaaggaaagtcccgagctgctgctgaaccaggacggcaccgtggccaccaccgaccaggtcctggcgggtttccgtggcaactgggacctgctccgccagggcaccaaggccctggacaagatgggcaagttgtcggacttcgaccccaatggcggcgccaaaggcgcctacggcagcggtgtactgcatggtgtaagcggcctgttcctggcgggtgtcaccattgcacgcggggcgcagagcggtggaaagctgaccacgcgcaacatcgtcgacatcaccaccggctccgtgcagaccaccaccgtgctgatcgagggcggcaccaagggctaccaggaacacctcgccaagtcgatcaagaacggtgagcagaccctcaaggatatgaaagacggcaaggtcatgctcgacctgctcgatgaggtcaaggacaacgtcaaggatggcaagcacgccaaggtcgtggcgaagaacttcgaggaagccgccaaaggtatcggcggcctggccggcatcgtcgtcggggcgtatggcatttttgatggcgtcaacgcgttgcgtcgtggcgacaagctgagcggtggcttcggcattaccgcaggctcgctgggtgtgctggccggcagcgcctcggccgcggagggcggcctgggtttactcggggcgaacctgccacggtttctcccgggcctggcggccacggcgggcgtgctgggcttcctggcggctggcgtggcggtactggcggccatcgtgcccggcctggtcaaggaaggacaggcacaggccaagtcggataagttcggcgaagtgctgggggattcaatccagcgttatggcatcgatggcgtcaaggatggaacgattgccgatattcctaccaaggattggccaggcggggagcaatggacttcgtgagataggctcgcccaccggtgccggtgacccgacatcggtgggcgttctgattctggagtcacttgaacgtcacccgccatagccgcgtggccaggtgatacgtcaccaccaggctgaaccggaaccaaacacccaccgccaccatcacccataacagaaaggggtacttgcgacgaaagaacttccgatagaagtgcaatatgcccctgtgcttatgccattcgacgaagtaaggccgatgttggctgcagccgcccaatgcgtgggttacccgggcgtccggcacaaacaggacgacccatccagcctggcgcaaacgcatacaccaatccaggtcttcgcaatgcaggaagtagcgttcgtcccataagccgatgtgctcgatggtttcccgcttgatcagcatacaggcgccggagatggcttccacggcaatgggcgtggagggcaatggctcctggtgcaataaaaaatcagagaacagcgacggcattacccgcgcaaggcgcgacaggccaaaggcccgcatgaatgcgcgccgtggggttgggaatacccgccgcccgcccggttgctcacggccgtccaggccgcacagtaacccaccgacggcgccgacgtgcggggtgctacgcagtacggcgagtaaacgggctatcgcatcggcggcgatcacggtgtcgggattgaggaagagcaggttcgccgccgtggaaaggcgcgcgccctggttgcaggccacggcgaaaccgaggttggcctcattgcgcatgatgtgcagtgaatcgctgaggagaggctcgccctccaacaggcccaggctatcatcgtgggaagcgttatcaatgacgatgatccgcgtcgcccccgcgttgaaaaccgatgtgacacaggccaacagcatctgccctgcgttgtagttgacgataatgacatcgcactcagcctgggcttgcgaggtgagcaacacgtgcttttgaggtgtttccagtacagccaacgtcgccactccctgtgtactcaaggtattgccgtagaaaaacgaaccgtccacgagttatcacgacgaaaactccgggtctgctcatctgatggattgaaacgcagggctttttccatcgccgcgccgaccccttcggggccgtccagcaaaaacgtgccagggcaagcgccccggtgcgccatctcgccaaacacggtgctgatcaccggcaggccgagtgcgcggtactcgtagtatttgatggggtcgacaaactgtgtcagcgcgtcgcatttgaaggggatcagcccgatatcgaagccagccatggcggccatggcatccgggtgcgagagctccccgatcaattggatattgctgggcagatccccaggcgggcgtgtgtgtattggcccgaccaagcgtatttgcgccaggggaaatgcctcggcaagcgccacgacgatttcccaggcgaaccacttcgcaatagtgccgacatagcccaccaccagcgggttggcgtttcctgcgtgcctggtgatgcggtaaggaagacgctctgtggcacaggcgttgccgagtaatgtcaccctgtcgcaatacgtcgacaattgcgcgtgcagcgcggaggaggatgtcagcacggtggagacggtttgcgctgttgtccgctggcgccgcgccatggcccgacgcgataagccggtataaaactcgcagaagttgtccatggcgtcgtagaaacttgcttcaaacaacggttctcgcagcagcattgacgctaggcaagagggttttccaatgcccagcaccgtgggctgcagtgccaattgccgcacgcgcgtaaacaggggttgccagagcagtcggttgacccaccctgaacccgcaataggctcgatgggtagggcgcgggcccggtacaccgtgagccagggggggacttcggtgtgcccgggtgctggctggggacgacgtagatcgctcagagcagggagacgcgtggggtaggggtctatccaaagcacgggttgttggtgtgtctcatggaaacatcgaaccagctcatggggacgctggctgaaactgtgccagggggttggggaaaggtagatcaggcgcatatgaaaaaatgctccaccagcacctggacgatgcgctctgcagccctgccatccccatagggggagtgatccttgatcatcgccgcgtaaaggctgtcgttgtcgaggagcgactgcaccgactcgacgatgtcatcggtgcgggtgccaaccagttggaccatgccatgtgccacggcctcctggcgttcggtttcattgcgcaataccagtacaggcactcccagagccggcgcctcctcttgaatgccgccggaatcactcacgaccaggtaggcgcttttcatcacgcggataaacctgtggtagcccatgggcgagcacaggtcgacgcgtgcatgccggcccaaggcagtctctatcggaactttcacattcggattcgggtggacgggaagtatcacccgaaggtcctcattacgctccaccagcgtatgaagcgccgtgcagatgtcacgcaagggggcgccaaaactctccctgcggtgcaaggtcaccagcaatacgcgctgtccatcagacggccgctcgcaggccacgtcgtcgcggctgaggctaaggtgcaaagcatcgatcaccgtgtttcccacgacatggatacggtgctcggcaatacgttcgccaagcaggttgctgcgtgctgcctgggtgggcgcgaagtgccatttcgcgattgtgctggccagggttcggttgagctcttccgggaacgggttgccaaggtcgcctgtgcgcagtcctgcttccacatggccaaagggtatttgcaggtaaaagcaggcgagtgcggttgcgaacaccgtcgtggtgtctccttgcgccagtacggcgtcggggcgccactcgatcagtaactgttcaagttgggtcagcaggcggctggtgagcgcgctcagcgattggtcggcgcgcatcaggtcaaggtccatatccggcacgaggccgaattcgtgcagcgcctggtccatcaattcacgatgctgagccgtcgctaccacacggcagtcgaacagcgtcgagcgcttgagcgcctggatgaccggcgccatcttgatgacttccgggcgcgtgcccaccacgaccatcactttgcatgtctgcatgacgtcatccatggcgatggggtatccaggttccccacttgctttcataaatcgctttgttgcgttcaaacagcgcttggcgtgcctgcgttcccatcagcttgaagctggcggacaagtgatggtgaatgaatacatcccgtgcgcaggcgttgaaatagcccgcttgttcgacccgccgacagtagtcgtcatcctcgaagaagccacagccaaacgcttcatccagcggccccacctgagcataggtgctgcgacgcaacatgacgcaaaagaatgccagggtaggcagggcaaaccattcgcccaggtgcctgtaggtgtaaagacgagcgtgtcgcggcatttcggcaagcgagtattcgatgttcaccttcgcctggttaccgatattgttcgtgaccgggccgatcagccctatgccggggttatggtccaggtgattgcgcagtgtatgcgcccaccccggcgtgacctgggtgtcgttgttgagcagcacgaggtagtcgccggtggcggccgcgagtccctggttgttcgccgcggaaaagccgcgattgtccgggttgaggatgacgtggtgcccgtggacgcgggcccagtgttcgagaaatgcgggcgtgccatcgctggagccgttgtcgaccacgataatttccagtgccgcgctcttgggatcggcaagcaaactaccgaggcacgcctgggtgagcgccaggttgttgtaagtcaccacaatcacgctgatatcacgggcacgtcgtgcgggctcagtggcgcccagtaacgcctcaagtcgatgggcccaggactgggacgcagcgaatgccctgcgttggttgccttgtatgcctggcggttctgcgagcgcctgggcgacgccgtcgatgaacgccccgggtgttcgggcgcgatagacccactcgccaaactggtgggcctcagggagatccacggtcaccacgggtttcccggcgctgaggtactcgtagactttcagtgggttggtggcgagcgtcagcggtgtaacccgaaagggcaacaggcacacatccatggcatgcaggtagtcgggaagggcgctgtaggcgacctcgccagtgaacacgacattggggtattggccgagcttgtgttggacgtgggcggtgtcggcaccgatcagcagtatcacatggtgtgcaaaggcttgggccgtcgctgcaacgaggtcgctgtcgaaccagtcggcgattgcgccgtagtagccaatgatcttgcgaccttgcgggtcttggtagaccgaggcgggacgccgcgagaggaactcgtagtcggccgcgttccgtaccacgatgcgttgttgcgacgccacctgttcccattgttgggcaagccagtcagaggtgaaaataatggcctgggcttcgcggaccaattgttgctcaagccctagaatccgagcgtcgttgttgccgaaaccttggtgatgatcgatgcagtcatacaccagtcggttgttcggcgcggccttggccacttcgagccagaaaggatgatgaaccagtgagactgtctcggtgggctgagtagagagcaacagctcgccgaggcctgttcgcaattgcgtcacctgggccggggacggcgctgtcgagtagatggaaggtactttgctgaggcgcaggcgaatttcgaacaggttcccccgttcatcaagcgggcgtatggaaaacccgggggactgggactcttgcaggctgctccccacgtagaaaacccgccgcccgctggcactgagcgtacgtgcgagctgttgtggccgctgatgacgaaaatcccagtcgatcaccccccagatgatgtagtcgggaccattgggggccgctagcatcaccttgagttgccgacgtgagacgctgccatgcagcggtcggcgtaaccacgtgaacaaccggttgtggaggcgcgcagacagccaccggcgaagcgccctgggtaacggcagctggcgataacaagtgcgcaggcgctcgatcagcgtggctttagcgcccgtcatggccgcgcacctcgtattccgggtagtcatgtaacggtgtggtatcgccctgcggccacatggagctgatggagcccggtcggtagaacgtgacggtgacactgcgccgggacgtggggctactgtctatcactcgggaaaccgcatgccaggagttatcgctgcgaaccagcaccgcggagttaccgatcaagggctggacctcctcgatgatgtgggtggggtcttgggaaccgagaatttgcaagcatccgccccggcatgggtgccatgattcattgaaatagagaatatgggtgacgaccttgtcgggcaggtcggggtgggggccgaggttggcgcccgggccatagtgaaacaggttggcttccatgggggcgtcgtgcagatcgataccggtcaacagcccgagtgcccgtcgataggccggtaaagtcagggtttgtgcgagctgcagccactgcgcgctgagcgcctgggggttagccacttggccattagtcattgaaaccaattgcctggcttcgtattcgtagtttttctcgccgccatagcccttgaccactttgaagtgatcgcgagggtaggtttcagccagcgccgtggcattttcgtggctatacaggttgccgatttgtgcccagtggaacggctggagctgtaacggatggtgggcaattttttccaagtcgatcattgagcattccttgccataaactttttgaatcggtgaaaaacaccacgcccatctgcctgggcgagttggcgcctggcgtccctgagctcaccttgttgtgtttgcatgttttcgaatactgcgggcaaggactgcaagacgcggttcatcacctgcggctcacccgctcgacgggtgacaatgagttctgccacctggtcccagtgctcgtgtagctgtttcaccgcaagttgggtggctggggacaatggctgcctgccaagttgcgcaaaaaaccactgcgggtcgagcggatggtcatgacgcaactggaagacacgcccataagccggtaacgctgtgaatttccccgtatccaggtgcgccgaacaaaacaccggtagaccaaaggcgatggcactgatggctaaatgataactgtggcctatcaccccaaccgaatgagcgatcagctcagcgagcagtaaaggtgagggccagaacggtaacgtcatcgagcgatcaagcgtcggccctagtgccgacgcatgatcgccaagcaccgggccgatcggcaggatcagcaactgcacatgcgccaacgcaggactggcgctgcgccaaagatcgaggaatgtatgcaggccgtctgcggcgtgtacgacgaggtaaggtttatccagctcgtattggctcaagaggtcgcgcagttgcgcagatggccgctgtacatccaccagttgggccaggccgaacgctgtatccggcagcacctcgatgcgcgcgtgttggctcactgactgcaaggccgtttgagtcaaggcatcacgcactttgacatgcgggctgtgttcgatggcaagtgccagtagcggcctggcccagtcagggacgtcgttgcaatgcatgcctggcgcgttccagatcaagggaacgccgtgttgcaatgccatcagggcgggaaccagccaatagccggttgggtgatgaatagcgggatcgggcggcaggtagccgtcagcgacaaatttatcgaagcggatgatgaagccgccgccgatcagcgtggcatccaggctatgcgcgattgctggcagttcggtcagggaggtgactgcatagggccattctccgacggttttcccgtgataggaaaaccggtgcatcctgaccgcgcccaagcggcgcgacagttccgcctcggcgatgatgggaaacaacaggtcgccataattggccacgtcgaatgtgccgtggatcgcaatctgccaggttctggtcttatcgttagccaagtgaagtgccatccttgagatgctggccctggggtagccgttcgacgccgaggtcgacgatgccgagaaagtcgttgccgagtaccaacgtatcgaacgacaagagcgcgacctgtttttcgatcagttgggcgctctcctcggtatggccattcatgagtttcaaggtgatgtgatatcggccggcggcaaagcgcgaacggaaccgagcggtaagggaggctttgcaccagccgtcatgcggcggttcgcgcaacaacttcaggttggccccgccgatcaccagtaaacgcggttcctgaatagtcaggctgatacttggcaaggtgatcgattcacgcaccatggcctccacccgcacctcaatcatgtcgtcgtgcacaaaggtggaatgcacttcctgggtattaacgaagtacgccgtgagaatgcgaccttcgtcagtaccaaaggcgatcccgtctttgttcgccaggtgcgcctttggcaccacggccacagcatcagcactggactcgcgacgttgctcatcacgcacatccagcaagtagcgctcggcaacctcctcgggcggcccgctggcgcggatttccccggcgcgcaggtaaaccgcccgtttgcagaagcgcttgaccatgttcaggtcgtgggacacgaaaagtagcgtggtaccgcgtgccgtgagcgcctccaaacgttgcaggcacttgaactggaacgaggcatcccccacggcgagtgcttcgtcgacgatcaggatgtcggggtccacccagacggacaccgcgaaggcaaggcgcataagcatgccactggaataggtcctggtgggctgttcgataaagtcgccgatgccggcaaagtcggtgatgtcgttgaagcggcgttcgatttcggcgcggctcagccccaggatggcaccattgaggaatacattttcccgaccactgaagtcggggttaaagccggagcccaactccagcaacgccgcgatccgaccttggcacacaacgttgccggtggacgcgctgagcgtcccgcagatcaattgcaggagcgtggatttaccgctgccattgcggccgatgaggcctattgcttcacctttttcgatggtcagtgtgacgtcccttaccgcccagagttcgcggtaatgcggggcctttccaggcaacagcagttgtttcaatcggtcctggggccgatcataaatccgaaaaaatttccctaggccggtgagctgcaccgcgatatcagaggacatcggcaaacccgctgcgcattcgctggaaaccctgaaagccaagccacgccacgcagcaggacatcgacaaacccagcgaccaggtcagcgggtcgatcaacttgccccagaacaggacatcccggacctgctcgatgatcaacgcgatggggttgagtaacaggaccgcttggtaggcctcaggcaatacgttgatggggtaaaacaccgccgaaacaaacagcagggccgtcgtcagtgccgtggtcacttggctgatatcgcgcagataaacgccaagcccggccaaaagccaggaaacccctagggaaaacaacaccagaggcaacagtaccaacggcaggaggagggcggtgagcgggggcggaccgagcagaaacaggtggaaaaccaaccagatgaccaagctcgcggttgtgtgagccaggacggaacccagcgatacccagggcagtatctccagggggaatatcaccttcttcacgtagtttgcgttctgaacgatcagggtaggtgcgcgctgcatgcactctgcaaagatattgaagaccaacaggccggcaaataccagcaacgcaaattcccctcgggattcgctcgcccccaaccacttctgtttgaacatcacgctgaacaccaaggtgtagaccagcaacatcaacagcggattcaggaacgaccacgccaggcctatcaccgatcccctgtaacgtcccaggatgtcgcgcttaatcatcgaactcagcagttcacggtgtgcccaggggctggaaaaaatcccgttcgatgccttcgccacatcccgtgattggcctcggatcgcgattttcattttggcttgcaagtgtcatccctgataagtcgagtactgttcatagcgtgtgccaacgaaaccttgactctcaaccgaggtgtgggctgttaccgttggcacatgactgaaagtagttcaaaaaggggaatttacaaatggcgtgcgcagcggacgaaacctttgaagagaggctggtcccattgaagcactgggggagggggcgggggatagctgtgtatcgagccgttcccaaggctcttcattgccttattcggcgtcaatgcggcacgagcagagccctgtagatcaatggcttacagggctgccgtgagtgatgaactgtgtcagggttattcttttacatccatgaactcttccgcccacgccacgtagctttccggcaacgtgtacgtgtgcgtcagttcggtggcactgaggttatccgtgctgtgggtcaactgacgttgggcacgcaggctgtcatacgtcgccttgatcgcggcgaagtaagccccatgaccggcaaccactatgcgcacgccaaggctggccagacgctgggcgtcattcagtttggggttggcgtaggtcaccagcatcagtggcaccgtcaggttttccgcgatcttctccaagtgcacgaaatcggccacaccgaccatgcaaatcccgtcggcgccggctttctggtaggcctgggtgcgttcgataacggcttcggtcggcaacacgccggcattggtccgggcaatgatcgacaactccggatcgacacgtgcttccagcgccgcgcggaccttgccgatgccttcttcaatggagatcaggtcggtggacttgcgcccgaactgcgccggcagcaacgtgtcttcaatggtcaacgcggccacaccggcacgctcgagctcttcgacggtacgcatcacgttcagggcgttaccgtagccgtggtcggcgtcggcgatgaacggcaactgggcaacgcggccgatgcgggtggcttgctcaacgaactcactcagggtgatcaacgcaaaatcgggtgcggccaatacctgcaacgaggcgacggagccaccgaggatgccgacttcaaaacccaggtcagcggcgatacgcgccgacatcgggtcgaagacggaagcggtttcaacgcaggttggggtggcaagcaattcacggaatttgcggcgcagggctgagtgagaaatctttggcatgggctttcctggttctgggcatcgtcttgtgacgatcaatgtctattcgtggtggggccagattaacatgcgggcgggggggagatgatgacgtttcagcattagggcaggggctggtgcatggagcgtgggtttacggtttgggggggacaggcgcccggggcgggcgccgtcctttccttcatgcctgttcttgatagccttttcgcagtttctccgcgatcagtttctctgcttcacgcaacgcgcgttcgggactctccagggatttgatcaaggtctggcccttggtgccgatgcggccgaaactcaccaccacctcagcctccgtgacgccgatacgccagaatttattagagttgccttcgccataggtgaactcgcgcatcgacggcgccgcttcaggggttaccgcaggctcggcttcgatctcgacggtttccacgacctgttccagcgctggcagtgcaggcgcttcttcaccccgaagcagcgcttcgatgcgcttgagcacttcctccggatcgcgcagccagtcatggctgagcacgtcgatgatcctccagccgaagctgcgcaataccgtcgggcgaaagatataacgctcacgcacgtcagtcgcggctgccgtgtcgctgtcgagcagcacccccagactgaagtattcaccgctggcgtcactgatcgccaggtcacagcggaactgtgaacgcccgacatattcctgcaccgagtgcccgcgttggcgcaacgcgacggcgagggcgctgcgcagtttgtccctaggcaggctgacggcaaaggactgcttggcgcccgggttgaggttggccaggatgccctgggagcgcggtgcatcgccgctggcactggcctgggcgaattgcaggaacgcgcgcaatgcggcggcgccgtcgttatgggtgttggtgatggcctcggactcaatgctggcgacaatcgccatgcgcttgcgcgcacgactgaagatcacgttaaggcgtttttctccgccgcgctggttgatcgggccgaagttcatcagcatcttgccgttcggtcccggcgcatagcagatgctcaggatgatcacatcgcgctcatcaccctgcacgttctccaggttcttgacgaacaggccattgaactgcccggcatcttcacgcacgtactcgcgctcaaggcgtgtggcaaaggccgaatcattgctggccaggtcttccagagcctgctcgatggcgccttgctgggcctcggaaaaggccacgatgcccaggctcaggccggtctcgcgttgcagcagttcacgcacgaggttggcgatgtagcgggcttcggccaggttgctgcggctgaggtagacgccatcgctcatcttcaagaagctgatcgggctgtcgagcagcgtgtcggcgccctggatcacggcctgggcgtcgctggagtccagcgcggcgtgggctggggcagggcgctcgatacgccggtcgggaatggtgatcagccgcccttcgtagaacgctgcgttggagaaactgatcagcgcctcgtggcgactgcggtagtgccaggccagcagggtcgccggcaagttgcgtgcggcctggctcagcaggctgtcggcatcgaggttgattgcgatctgttccccgtcctccatggcaatcaggtcgttatcgtcctggtcaccggcactggagaagaagttggtcggtggcaactgcatctcgtcgcccaccacaatcacctgctgcgcacggctcagggcgggcacggcttcttcgctggggatctggctggcctcgtcgaaaatcaccacgtcaaacaggtccggggtcaacggcagggtgtcggacaccgacaacgggctcatcagccagatgggcttgaggtcgttgatcacccggccactgtcgccactggccatttcgcgaatggagcgatagcgcatggtcttgcccagctcatgttccagttcgcggcggcccttggcataggctttcttgaactcgcgggcctgggcgtccagctgggtcactgacatcgccgattgcttcacatgctccagaaatcgctggtgcagggtggcgctgagcacgtgagcgttgctcttgagcaggttgctttcggcctggctgacctggcgcgcggccaggctcaaggccggaccgtcaaagcgtgccatctgcggattggcacggtacaggcgggtcaggttttcctgggcaatcaacccgtccagcacgggttgtggcaaagcatactgttgcacgaccgccaggcagccgggatcggcctggtgcagctcgttgagcaggggcagggtgtcgggcagttcgtcgagttcttcacgcaggtcgcgcaggtattcggccagctcggccaggcttggcgcggcgtcgaacacacactcttgggcaaccagctcggccaggcgcgcgatgggttggcgcaggctggcttcctggcgcacaacgggcaagctgctcgggttgccccgcaggccttcgacccacttgcgcaacagcggtgatgcgctcagttgctgcagcaaggcttgcaggttgtgcacgaacaggtcgatatcctggatgccgtagcgaccttgcaggcgttgctgctcggcgtgcagctcggcggtggcgcggtgttcaccggccaggttgtcgagcacactgcgcaggctggggcgaatcgcgtgctgactgaagtcgtagcggcgttgaagttcgccacgcaggcgccaccagccgggttgcaaccagcgcagcagcgagccttcctggcgctgtacctgctccagggccgcctgggtgtcctggggctcaagtttctcgcgccagtggcgggtggtttcacgggcgttgtgttgctgcacggccagtgcctgcaagccggcctgttcggcgtgcagcgcttgggaacccgttgagccaggttccagcaggtcgaggtgagccgccaggttggcgccggtcagttgctcggcggcttgagtcagcacgcacgcatccgtcagacgcgtgtcaccggacagcaggctggaggatgactccaggaacgactcgacgctgtccatcagcccactggcttgctccagaaacgccttgagctggccgtaggcatgctcgtgggtgaccaggcttgaggccaggtggctgaaggggtgacgcgcaaaactgtcgaggccgaagcgttccttgatggtctgatacaatcggccggtcagctcctgttgtgcctgccagtgccgccattcgggcaagcgttccagcgcttcgggcggcagctgtgcagtaacgggtggcagctcgatcaaatgacggaccaactcacgcaccgaacaggccaaggactccggcacgccggccatcgcctgttcaaagcgctctatcaggcccagttgctggctcagggtcgccagcgtggcgtcacgccgagcttgtaactgcgatgattgggcatcaccggcgatccagcgctcataacactcacgcaggttgcccacgaaggctttcttgtcggtctgggagtcgtgaatcaggcagcacaattcgcccagttcactctgttgcaagcgatggaacaccacgtccagcgccgcacgcttttcacacacaaacaatacgcgcaggccgcgcgcggcgtagtcggcgatcaggttggtgatggtctgggacttgccggtgcccggcggcccctgaatgatgaagtgacgcccggttcgggccaggctgacagcggcgttctgcgtcgcatcaccggccaccacgttccactggtcgggcagcgggatcgggtctggagtctggacttcgacgtctcgcggctcaatcgagaacatccggtcaaacgcttcgttttgcgcgggctcatcgatcagctgtgcgtagtcacgcaccagcgacatcttgcgatagttgaagttggccagggtcacctgggtcaggtcgatgtcccaggcgtagcggtgcccctgattctcgggcatggcgaaggtgctgttctcggtgctgctggcgaccatctgcggatgctggttgcgcagcacaggtttggcgccgacggccaggcgcaacggtaactcgctgggcagcaccttttgctggaacaattgcaggcccagcgggcggtagtcttcgcggtcgtagctgaaatccggcctgaccaagggcatcgccgaatgctgacgggcgcgacgacgctggaagtggtgcagatgctgcacggccttctggtggatcagttcgatttgcggtttgctttgcaggcgcaactcgacgccgggctcggtcagcttgatctggcgcgcaatatcggcgtggatttcctccagggacgtcttttgcaggtcgacggtttccggcaactggatatcgtagagctggcgcagttgatgccgcagtaccgggttgaactcggcttcggtctcatcgcactgcaacatgaactggtcgcgcacaccctttttgcggctcagttccaccggcagccagagcaggggagtgacgatgcgttcttccggcgtgtccttgaggttgtgccagcgcatgaaggccacgaccaggcgcaggttgctgaagccgaactcggcgcggtcgcggcgggtttcctggatgatgcgttccagcgacgcctgcaaccaggtctggtcttcaaaccgcaaccattgctgcaggccaaccggtttgccgctcaacacctgctcggagaagccaccgaaggtaggctgccaggtgcacaaggcttcggggcggatactttcaacgcgcatcaccaagggcacgctggccacggtcaagttgacgttggcttgcgttggccggaagtacagcaggcgattgcgtcgcgaaaggtcaaacaagcggttacgcagatgctccagcaccacggtgcgccgtgaagccgggccttcggcctgggccaatacacgctcgacatccaggctggccggctgttcgcgccaggattccaggcgccgcaccagtgagccgacatccgtggcgcgttcatggcggttcagctcggtcatttcaacgatcaaattggccagcaccgggttgagccggccgttgagctggaacaggttacggcgatgccgggcaaaggccttgaggtcgttgatatcggcaaaatccaacccgcacgccaggcaggccagcaactggccgagctggaaaatatcggttatctcgtcgtggtgcccgaggcgatgctcccaactgtgcaggtcggtgaggaacaccgggtggtcaatggtctgatgcgggtcttcctggacttgcaggtcggtcacggccacgccactttccgaatcccgggtcaggcggaccttgccgacaatattcagtgccgactccggattaggctgcacctgcttgatcgcttccaatgccagccgtggcgagacgccttcgggattgcgcagttgcagcgtgcgttccggcccttgcagcacatcgagataactgagttgggcgacacgtcccagttcatgcaattgcgcaacctggcgcagtaacggcagcgccaggaacagcacatcgtcgatggggacggcgacgccatcgtgggtctgcagcaattgcgtgaaattgatgggttgggttatcgggtccatgtgtcgacctccgctttgagcgcgcgaacgatcgggtcgagctcacgtttgggtaatttgatatcgcgcttgagcacgttgataaagtcgtcgctactgccgagcttcttggcggtgcgcgccgcgtgcaacaaggcctcatcccgcaggtcgcggtccaccaggctcaggtcgagcatgatgaagtgcaggtattcgtggatgcttgcgtcgacacgctcggcattcagcgtgcccaggtccagcgtggtttcgttgtctttccagtcgggaaagaatccacgtacctgattgagcaccacctccgattgcagcacggaggtgccgatgaagctggcgataaagctgcgggtgagggcggtcagctcgacttggccgatcacatccaaacgactgagcgccagcggcccgcgcaaccggccatgcagccaattgtcggtatccggcacctgccgccaccagctgtccaccgcctgggagcgcagaaacgtctccgggtgcgaaacgccttgggacaaccgtgcatccttgccatccagctcctgggcctgcttcaggtaactggcggcatcgacgctgacgatcccggtgtgaatcttgaccagcgaggtaatcgacgcttccggcccgccggccaccagggccgcgcctcggtcggcatagatttcggtgtgcaggctatataaacgcgcggtctgttccaggctcggaggcgtattcatatcagccatggcgtgattgagaatccgctcggcggtgagatagtcaccaccgtgctcagaccataagcggtaatgggccagctcatgcccgagcagcgccagtaactcctgagcgtcgagccgttcaagaatcggtccgtagaacaccacatgcacttcaccggccaggtaatacaggctggcgttcatcgcgccgtcgccggcttggtaaagcgtcgcgggcgcctggatctgcaagcattgcagcgccgtctcacaggcctgataggcctgcgggtgggtctcggggctcaggcgataggtgtcccgcagcaactgtgcgcgcacatcctgggcatgttcctgctggacgcccagagacgaggcccattcccacacaacaggctcatgggttttcagataatcgaccacacgctggtggtaaggcaagggggtcaggctgctgatatccagcgcgggggtactcatcgttcaaacgtccttgagaggatacggctccatagactgcgactgtgcagcagagacttgggcgggcatcccggtatcagtgatcggcaatagaggcggagcatacctagggggtaggaaaattacttgtgaaagtgcttggatgcgtggccagctgcaaatgcagttagagtggtgatgattatcttgatcgctgtgtgaaaaatgaatgctccgctttttgtttctctggatggccccaaaggcaccggcaaaaccacgttgttggaggctgtaacggcggcactgagggcggaaaacaagaaagtcattcggctttgcgagcgaaaaagcgacccctacaggggtgaaaccatggccctggtcaatgaacttgccagaaatccttcacgggatttggaatgggctgtgtgtgagcgctttgccgagagtcgccgctggatctcccggaacgtactgactcggcagccgttgggcagcattatcctgattgatcgctggtatccctctgaggctgcgtttcgacacacgataccgtttgcagagattctgcagttgaacctggagctaagcgtgcgagtgccggatctgcatgtcggtgttgtcaccgcgccggatatttcatgggcgagagcaacggcacgatcacgaggattgggcggcacagtgattcagaagtatgcagagcatgttgcgtgtaccgaaatgttcgagcaggcggttgtgggtcagggctgggtgttatgccgtaatgaaggtgcgattgaagaggctgtgaagcaggtggttgttgagattcgtaaagtggctgggtgatacgtgtagcgtaatacatgatttaacataatatacattatgcgtaacataatattgcgtaatcaggggcagtgcccgtcagatttcaacaggcaaaaccccctgtcagattcaaacctgagcaaagcctccatcgacaaacatttcactgcccgtcatgaagctgctctcatccgatgccaggaacaacgcggcggctgccacttcttcaggctgaccgatacggcccagtggcacctgcgccgtcatgtcgtcgatgatcgcctccttctggcctgtacctgacaacgccgagtccaggcctggtgtcgagatcggtccgggtgaaagtacgttcacgcgaatgccggtgcctttgagatccagcgcccagcttctggcgaaattacgcaacgccgctttggtggcgctgtacacgctgaacgccgcggtgcccattgtcccggtggtcgagccagtcaggatcacggaaccgccggcctgcatcagtggcaaggctttttgcacggtgaacagcgtgcctttgacgttgatgccgaacgtgcggtcgaacgattcctcggtgatcgacccgatcggttggaaatcccccaggcctgcattggcaaacagtatgtcaacccggcccttggcagctttgacctgggtgaacacacggtccaggtcgtccagcttggcaatgtcggcctggatggcgatggcgtcaggcccgatcagctccagcgccttgtccagctctgactgtctacggcctacaatcaccacctgtgcgccttcagctgcaaagcgaatcgcggtggccaggccgatgccgctgttgccgccggtaaccactgcaacttttccgttgagcttgctcatgatgactccaaaaaagaatgttgaggcgcaactctagatccgctctattcttttgaatagtatgcaccttttggtaagtacccttggaggcacctcaatcatggccaataactcattcaattgcgggctcgaggcggccctggcggtgattggcggcaaatggaagccgctggtgctgttcaacctggcgcagaatgttcatcgatatggagaattaaggcgcgcgattggtggtgtgaccgataaggtgctgatccagcaactcaaggagttggagcgcgatgagattatttttcgcgtggacttccaggaaataccgcccaaagtcgagtattcgctgacgccgttcggggagtccctggcgtcggcgttgggtgggttgtgccaatggggtacgcagcatatgcaaacggtagagcgcatcgccgcacggcggacgtctgccctctcccaatcctgagccccctgccctgatgcctaactcaactaaatgactatttagttgagttaaatcaatggtttacaactgaaatcgatcaaccgactgcgacagcttgccggccaggctggacaattcgtccgttgttgacgctgtctggccaatgacccggctgttgttttccgacatgccggcaatcatctccacctggtgcgcaatttcattgctggccaggctctgttcaccgatagtgcgcgagatatcgttgaccatctccgtggtgttcagggtcgcttgcaaaatctcgcgaatcgcccgctccacctcggtggttaccgccatgcccttgtccacctgagccacgccctcctccatgctggtcaccgcttcgcgggtactttgctggatacgctcgaccatgctggcgatttccagggttgaggcactggtacggccggccaggctgcgaacttcatcggcgaccactgcgaacccccgcccctgttcaccggcgcgggcggcttcgatcgcggcattcagggccagcaggttggtctggtcggcgatccccttgattacctggataatgctgaaaattgcttcggactctttgtccagcgtgcggatcacctgggccgactgctgcgcggagcgggcaatgccgcccatgtcgttgaccacctgatgaatcacccggccaccgtccttggccaaggtttcggcctggttggccatgtccaacgctcgcccggcatgccgagtgatttcctcgatactggcggtcatttcactcgcagccgcggccatggtgctggccgccgcactttgttgctggctgctgccggccacttcatggcagccgtggctcagttgctcgctcatgccattgaccccgtgggcgttgctgcgcaccacttcgatcatgccgcgcagatcccgttgcatggtggcgaggctgcgaatcaatgtgctggcttcatctttgcgctggggttcgacaatcatttcgctcaagttgccccgcgcaatgctggcggcaatacggctggcagcctgcaacggccccatgatgctgagcatgacccagcggccctgagccaacagcagtaaaaggctggcgagcaacaccacgccgagggttaaattggcgttgctgatggtctgctgtgtaccgaggctggtctgctgggtgttggtctcgatcagctcgctcagcgcggccatttgatcttcaagctgggtgaaggcggtgttgaacgttcccagttcattgcgtgcggcgtcgggattgtccagcgccaaggcgacaatgcgctcaccggcggcaatgtagttgtccaggctcggtttgattttttccaggttcgccttgagcgtgtcgtccaacggcagcttgaggttgtctgccagcacctgccgaaagtgctcagcgtgatccttcagggagctgttcacctgcgctttgctgctggtgcttttgcccaggcccaccagcatggctgacagtacatcggcacgcagggcgtcgtgcatcatgtcggcttccatgtgattgcgcagcaccgtcatgctcaactcgttgtcctgcacggcattgcccatccgggtatttcccaggtagccggcaaggctcatgatcaaggcggtcagcaatccggtcgcaatcaacaacatcaagcgcagtttgatcgtcatgcaggtatccccatagcctggacagccggttgggaacccaaccgcttgagcgtctagtaccgttatcggcagccgttgcttattagtgaagcccaagtcagggaatctgcgcgattcccttgtgctcgcgtgcaagggcagctctttgcctcggcgttatcagggctacatcgaagttgtaatgactctgtaagcgtcatcttgtacagccgcaggcggaccactaagctggccgatcccttgaaggtaccggaattccatgtctcgaagcattgcccacctcgccctcctcctgggcttgatcaccgccgtcggcccgttcgccatcgacatctacctacccgcgctgccaaccctgggcgccagcctgcaggcctcgccggcgctggtgcagatgagcctcacggtgttcttcgtcatcgtcggcctgtgccaattgttctacgggccgatcagtgatgtgttcgggcgcaagccgccaatctatgccggcctggtgatttttatcgtgggcagtgtggggtgtgccttggcgccgaccatcgagacactgatcgcgtttcgtgccctgcaggcgttcggcgcctgcgcgggcatggtaattccccgtgccatcgtgcgggacctgtacaccgggcatgaggccgccaggctgatggcgttgctgatgctggtgatgagcgtctcgccgatccttgcgccgttggccggcagcctggtgattgcgctgtggagctggcgtgaagtgtttgccgtgctggcggtgctggcggcggcgtgcctggtgatgaccattgtgcaactgccggaaacccacccggccgaacgccggttgggcaagaccctgggcaacgccttcagcagctatggcgcattgctgcgtgacccggtattcatcggcctgtcagtggtctgcggttttggcctggcgaccttcttcgtgtttatcggcagcgcgccgttcgtgtacatcgagtactacggcctcacacccacgcagttcagcctcggctttgcgttgaatgctgcgtcgttttttgccatgagccaactcactgcacgcctcagtgcgcgctttggcctggcgccgctgattcgttggtcggtaacggccgtggccgccgtgatggccgtcctggcggccacaacactgtggctcgacagcctggccctgaccatgaccctgctgtttatcggcttcggctttctcggcttgctgctgccggccgccggggtactgtccctggaggatcatggcgcggtagccgggtctgcttcagccctgctcggcgcgatccagatgatcatcggtgccgtgtccatgaccctgatcggcgtgttcgccgatcacacgccggcgccgatgctgatcggcatagcgctgtgcgctattgcggcgctgttgaccacgctgtggaccttgcgtcgtttgccagcgcatttggccaacaacccgccctccccctgattcatcacaagtcaaaccgatccaccgcccgccgccgctcattgtcgtcacgcacgtcataactggcggtggtctggatattggtgtggtgcgcgagcttctgcgcgatcgacaggtcatgctcctcgatcacccgggtgatgaacgagcgacggaagtcatggggcatgatcttcacccccacctgttcgccgcgctggcgggcgatgtagtagatggcatgtttggtgatgcgctcgcgagtgatgtggctgccacggcggatacggttgaacaggaagctgtcatcctgctcgccctccttgagctgctcgcgccgaaacgccagccacgcctgcaatttggcgaacgcccagtccggcgcgtacttgatcaactccttgttgcccttgccgatcacccgcaggctgcgttcttcaaagttgatttgcgccaggtcgaggttgaccgattccgacttgcgcatgccggagccgtagagtatgccgatcaccgcggcatcccgcaggccctgggggcgtgggtcggcggcgcagacttccatcatttcgcggatcaggctgcgccgcaggttgcggccctggcccaggcgcgtaccgggtgcagccttgacggtgcgcatgcgcagcaggtgctcctggctgatcaggttcagacgccaggcttcattcatcaccccgcgcaccgcgttcacatacaacgaggaggtattcggtgcataaccgtcctcgcgcagggcggcgaccagggcgatgacgtgttcgggttgcagcaagtgccagtcgatgtcttcgaggttgatatcctcgaagcccaggcggtcggccgcatcttgcagcacgtagcgcatggtcaattggctggagggggccaggcgggtgaggtatagggtcagtgggttgcggatagactcagtcaaggtagatcagcctttggattaaatacctcgaacaagcctttgtttaatcgaggtatttagtgaattggcgagggccgagtctaacccaggaccagccccggcacaaaatcacggggccgtatcgtcgtcctcggtgggctcctgaggctggacctgggtctggctccactcgctgtcctgcttctgcatcaatgcgaaccagtgctggcgcatgaacgtcaggtacgcctccggcgccttggcaaagtccttctcatcgccataacaccccggcaacggcaattcggtgccctgctccttgtactgactgaccagcgcctgctgcgcggccacgctgcagtccttgggcagaggcatgccgcgcagggcgccggcctcttcgtcccaccaggccgcaccgacgcggtcgaccccgcgcagacggtacttctgcgacttgccgacatgcatgatcaacttgaattcgttggggctgacgtcgctggtgcaggtgcgcgaatagcccacggtggcctgggtgatgccgtcgccagagaggtcggtgactttggtcgcagccctatcaaagcgcagggatgcgtcgaattcgcaatgctgcacatcgtcgtagagcatccacacgcgtttggggcggttgccgtcgatcaggtactgggccgcatacacgaacgccgactgggtgccatcgtcatcgcgctcgctgacttgctcggcgagcaccagcaggttcttgccttgtttatcgtcccaggtatacgcagcgatctgcttgccgcgcacttcgacaccgtccggcacctggtcgatgctggtgagcgccactccgtcatccgctcgtacgctggtgacacacgccacgctcatcaacaaccccatcaacaccggccgcaactggccgcgtaaaagctgcacgctattcatccgatcaccctggcaagagacggcttactttaccggcacttgcagggcattgcagagaatattcttcactgaaaacaggattgaataacattgcgtcgcgatcccccccggcgccttgtgcagcaccgcgtccgcttagctgaaccctagctgtctacctgtcaaataaacgagtttttcatctgcgtttcatattcgtactacatttttacgcttaatcttgcccttgttgacttgagggccatccgcgcttctccaactaacccattgattccgctttacctttacgcaatatcgtctttactgcagttcaccaggaagaacacacggccagcgctcaggaatgtcgaatgaacaccacgcacaccactgccttttaatcagttgcctgtactttcgcccactgattgctgctgtttcagcgctccaagttgctctaaccccgaggtcatgaatctttgaaaccctaccctattcattgcgtgtcgatcgttatcccggtctacaacgaacaagagagcctgcctgaattgctgcgccgtaccaccgcagcctgcaagcaactggcctacgaatacgaaatcatcctggtggatgacggtagccgcgacaattcggcccaactgctggaagacgccgccgctgaagacggcagcaacgtggtcgcggtgatcctcaaccgcaactatggccagcatgcggcgatcatggccggtttcgagcagtgccggggcgaagtggtgatcacactcgacgccgacctgcaaaacccgccggaagaaatcccgcgcctggtcgaacaggccgccctcggttacgacgtggttgccaccgtgcgcaacaatcgccaggactcggccttccgccgctggccgtcgcgcctgatcaacctggccgtgcagcgctccaccggcgtggccatgactgactacggctgcatgctgcgtgcgtatcgccgcaccatcgtcgacgcgatgctcgcctgccgtgagcgcagcacttttatcccgatcctggccaacggttttgcccggcacaccacggaaatcctggtgcaccatgccgagcgcgaacacggcgaatccaaatacagtgccatgcgcctgatcagcctgatgttcgacttgctgacgtgcatgaccaccaccccgctgcgcctgctatcgattgtcggcttcagcctggcggcgctgggcatgttgttcgcctttgcattgatcatcctgcgtatggcctttggtgccgaatgggccggcgaaggcatgttcgtgctgttcgcggtgctgttcgtgttcaccggtggccagttcatcggcatgggcctcctgggtgaatacctgggccgcatgtacagcgacgtgcgcgcccgtccgcgcttctttatcgaaaaagtgctgcgcaaccaaccggcagcaccggctcccgtggtcgtcgtcgacggcctggtgtcctcccatacctctacttctgctgatcaggtctaatcatgagttcaaaagctgttgtattcgcgtaccacgatattggttgtgcaggcattgaagcgctgctcagcaccggttacgaaattgctgccgtgttcacccatgccgatgaccccaaggaaaacaacttctacggttccgtcgcgcaactgtgcgcccgcaacggcatcccggtgcatgccccggaagacgccaaccacccattgtggatcgagcgcatcgccaagctgaacccggactacatcttctcgttctactaccgcaacctgctcagcgagccgctgctggccaccgccggcaaaggcgcgttcaacctgcatggctcgttgctgccgaaataccgtggccgcgccccagccaactgggtgctggtcaacggcgagaccgaaaccggcgtgaccctgcaccgcatggtcaagcgtgccgatgccggtgcgatcctggcccagcagaaagtcatcatcgagcgcagtgacaccggcctgaccctgcacgccaaactgcgcgacgccgccattaccctgctgcgcgacgccctgccgcaactggcccagggcaaactggccgaaaccgcccaggacgaaagccaggccacctacttcggccgccgcaccgccgccgatggcaagttggagtggaaaaagccggctgaagaactgttcaacctggtacgtgccgtgacccaaccttacccaggtgctttctgcgccgtgggcgagcacaaactgatcgtgtggcaggccgaagtggtcaagggcaacgaaggcctggcccctggccgcgtgatcagcgtcaacccgctgcgcatcgcctgcggtgaagactccctggtggtcaagttcggccagcgtaacgccgacggcctgttcctggccggccccgccctggcggacgcactgggcctggtcgacggttccgtactgcgcggcgccgagtccggccgcaagcctcgtcgtacccgcgtgctgatcctgggcgtgaacggttttatcggtaaccacctgtccgagcgcctgctgcgtgacgaccgttacgaagtctacggcctggacatcggttccgacgccatcgagcgcctgcgcagccacccgaacttccattatgtggaaggcgacatcagcatccacaccgagtggatcgaataccacatcaagaagtgcgacgtggtcttgccgctggtggccatcgccacgccaatcgaatacacccgcaacccgctgcgtgtgttcgaactggactttgaagaaaacctcaagctggtgcgctactgcgtcaagtacaacaagcgcgtgatcttcccgtcgacctccgaagtctatggcatgtgccaggaccagtacttcgacgaagacacctccaacctggtggtcggtccggtcaataaacagcgctggatctactcggtttccaagcaactgctggaccgtgtgatctgggcgtacggcgacaagggcctgaaattcaccctgttccgtccgttcaactggatgggtccacgcctggatcgcctggactcggcacgtatcggcagctcccgcgcaatcacccaactgatcctgaacctggtggaaggcacgccgatccgcctgttcgacggcggcgagcagaagcgttgcttcaccgacatcgccgacggcatcgaagccctggcacgcatcattgacaacgaaaatggcgtgtgcgacggccagatcgtcaacatcggcaacccggaaaacgaagccagcatccgtcagttgggcgaagaactgctgcgtcagttcgaggcgcacccactgcgtggcaacttcccaccgtttgccggtttccgcgacgtcgaaagcaaggcgttctacggtaccggttaccaagacgtggcgcaccgcaagccaagcatcgaaaacgccaagcgcctgctgaactgggagccgaccgtggagatgagcgaaaccatcggcaacaccctggacttcttcctgcgtgaagccatgctcgaaatcgcggacaagaaataatgcaggcaggcctccgcatcgacgtcgatacctaccgtggcacccgtgagggtgtaccacgattgctcgagtccctggatgaagctggggtgaaagcgacgttcttcttcagtgtcgggccggacaacatggggcgccacttgtggcgtctcatccgcccgcaattcctgtggaaaatgctgcgttccaatgcggtcggcctgtatggcctggacatcttgctcgccggcactgcctggccgggcaaaccgatcggccgcgacctggggcacttgatgcgccaggccaaggccgccgggcacgaagtgggcctgcacgcctgggatcaccatggctggcaggccaataccgggcgctggagcgaggcgcagttgatcgagcagatccgccgtggcgtcgacaccctcagcgacatactcggtgagcgcatcgactgttccgccgccgccggttggcgcgcggatgaacgtgtggtgcaagccaagcaagcttttaactttcgctacaacagcgattgccggggcaccagcctgtttcgtccaaccctggccgatggcagtgcgggcaccccacaaattccggtagacctgccgaccttcgacgaagtcgtcgggccggtggtggctgccaaagacttcaatgggttcatcctcgaccgttttgccgcgtcgaaactcaacgtttatacgattcatgccgaagtagaagggattctgatggccaacgattttcgccatttgctcgcccaggccgggcagcgcggcatcgacttcaaaccactgggcgagctgttgccagcggacgtgaccaccctgccccagcaacagctggtgcgcggtgcgttgccgggccgcgagggttggctcggagtgcagcaggcatgatccgccgttgggccttgccccttctgctgttggcgtttggtgtgttctacctgctgccgctggctacccatggcctgtggattccggatgaaacccgctacgcgcagatcagccaggaaatgctgctgaccggcaagtgggcttcgccgcacttcatgggcatccgctacttcgaaaaaccggcggcgggctactggatgatcgcgctgggccaggcgatcttcgggcagaacctgttcggcgtgcggtttgcctcggccctgagcacgggcttgagcattctgctggtgtacggggtgtcgcgccggctgtggaatgacccgcgcaaaaccctggtcagcaccgtgctgtacatgagttttgtcagcgtggccttgctcggtggctacgccaacctggatccgcagttcaccttctgggtcaacctgaccggtgctgccctgtggttctgcttcgacagcaccacccgcaacgggcgcctggggtcctgggcgttgctcggcctcgcctgcggcatgggcttcatgaccaaaggctttcttgcgtggttgctgccggtgttgatcgccctgccctatgcgatctggcagaaacgtttgcgtgaactgctgggctatggcgtggttgccgtggtggtggcgattgtcgtcagcttgccgtgggcgctggcggtgcacctgcaagagccggactactggaatttcttcttctggcacgagcatatccagcgcttcgccggtgacgatgcccagcatgccgagccgttctggtattacctgccgctgctggttgcgttctgcctgccgtgggtggcgctgttgccgtccaccgtcaaacaggcgtggcgcgacaaacgcagcgcaaaaatcggttttatcgtgctgtggctactgatgcccctggccttcttcagcctggccaaaggcaagctgccgtcctacatcatgccgtgcctgctgcccctggccttgttgatgggcaataccctggccgacaaactggcccagggacgcagccgtgcgctgcgcatcaacggctggctgaacctgatcatcggcgtagtggcattgctcgcgctgacctgggtgcaattgaagaaaccggtgtacgagcacggccaggaaaccctaagcctggtgctggtgttcacctttctgtttgcctggatcctcgtcaacctgttgcaggcggcccggccgttgcacctgtgggccgcgccggtcctcggcagttggctgatggtggcattgctgcccgccgcgttgccgcactcggtggtgtacaacaagactccggaccaattcatcatcgaccacctgcaggaactgcaaccggccacggccctgttgagcaatgacctgggcgcagcgtcggcactgtcgtggcgcctggcgcgcccggacgtgacgctctacaacaccgtcggcgaagtcaaatacggcctggcctacgcggacgccacgcaccacaaggtggataccacccaagtccagcaatggatgagcattgcgcgccaaaagggcccggtcggcgtggtcatgcgggtcaagggcgatgacgaaatcgcagaagtcgacttactgcccaaggacggcaagcgctacgaacaaggcaacatcgtgatcctgatcttcccgcaggctgcgcaatgatcaccttgctgctgttactggccgcctgcctgttcacctgcatgggccaggtttcccagaagttcgccgtggaaagctggcgcgacctgccggatggctgggcgctgaaactgcgctcgccctggttgtggtcggcgctggtgtgcctgggcctcggcctgctggtgtggctgctggtgttgcaacgcctggaagtcggcattgcctacccgatgctcagcctcaacttcgtgttggtcacgctggtcgcgcgttttgtattcaaggaacacatcgacacccgccattggctgggtgtggcgctggtgatcggtggcgtcgtgctgctggggcgccaggtatgagccgggttcagggctttgccctggccctgggcagcgtcggcctggtcagtgccgcccaactgggcatgcgctggagcatgacgcgcctgccgctgcccagcgaatggctggacgccttcagccagaacagcatcgacctgggcgccctcggcgtcgtgaccctggcgatcctggcctacgcgctgtcgatgctctgctggcttggcgcgctcaagcatttgccgctgggccgcgcctattcgctgctgagcatcagctacgccttggtatacctgctggccgccagcctgccggtgttcaacgaacatttttccgtttcaaaaaccctgggggtggcgctggtcatcctcggtgttctggttatcaactctcgtcgtgctagcgccacaagtcccaggaatgccccatgaaaatcagtgtatttggtagcggttacgtcggtctggtgcaggccaccgtgttggctgaagtcggccacgatgtcatttgcatggacgttgacaagaacaaggtcgagtcactgcaaaaaggccatgtgaccatcttcgagccggggctggctgcgatggtcaaggagaacctggagagtgggaggctgcacttcacccatgatgaaaagttggcggtggaacacggcgaagtcctgttcattgccgtgggcaccccttcggacgaagacggctcggccgacttgaaatacgtgctgtcggtaggcgacgccgtggcccgccaccgcaaagagccggtgatcctggtggaaaaatccaccgtgccggtcggcaccggcgacaccctgcgcgcccacatcgaaaaagccctgcacctggccggccggcaccttgagttcgatatcgtctccaacccggaattcctcaaggaaggctcggccgttgccgactgccgccgcccggaccgcatcatcatcggttgtgagcgcgaagaagtgcgcgacgtgatgcgcgacctgtacgcaccgttcaaccgcaaccatgaccgcatcattttcatggacctgcgcagcgccgaactgaccaagtatgccgccaactgcatgctggcgaccaagatcagctttatcaaccagatcgccgagctggccgagcacctgggggcggacatcgaagccgtgcgcctgggcatcggtgctgactcgcgtattggctaccactttatctaccccggctgcggctacggcggttcgtgtttccccaaggacatgcgcgccctgatccacagcgccaagcaagccaactgctccagcgacctgctggaagcggtggaagccatcaaccagcgtcagaagagcaagttgttcgaacggatcaatgcgttcttcaagggcgacctgcgcggcaagacctttgccctgtggggcctggcattcaaacccaacaccgacgacatgcgcgatgcccccagccgcgtgctgatggaagccctctgggccgccggcgccaacgtacgtgcattcgacccggaagccatgcaggaaacccaacgcatctacggcgatgacccacggctgatgctcatgggcaccccggaatcgaccctgggcggtgcggatgcgctgatcgtctgcacagaatggcagcagttcaaggcgccggacttcgacctgatccaccagcgcctgaaaaccccggtgatcttcgacgggcgcaacctctacgacggcgagcgcctggcgcgcaaaggcttccagtactacccgatcggccgaggcgattcctgccaactgccgattccccagcagcaatgggtagccctgggtgcaggccaggtcgtggaagcctgagacgtgaacagagttcaaccgtccccgctgaatgcgacgattcgccgccaatccctcggtttgggattgctggcgttgttgctgtttatcgccggcaactggcaccaggcgatcattggcttcgactcgcgcttcgtgttgtttgcccaggaaatgctgcggcatggccccagcgtcttccccaccacctatgggcagccttacgcggattacctggccacctcgacactgttgacctggctggtttcattgcccctgggccaggtcaccagcctcacggcctggttgcccacggcgatcgcctcggcgtttatcgtcaccctggtttatcgcctgacggcgccctactccccgcgctgggggctgctgagcattgcgctgctgttgttgagcagcaacttcatcagcgaaacccgtgcggtgtccctcgaccagatgctggccgccatcgccctggcggtgttctacctgggttatgcccatgatcacttcggggcggctaaacgcctgcattggctgtacctgatgctgatcctggggtttgccgtgcgcgggccgattggcctggtgattcctacgggcgtgctctgcagctactacctgatcaaccgacaatggcgccagctgttcagtttcggcttgctggccctggcgctgctggtggcatgcgtgggcctgctgttgctgatggccaagttgagcggcggcgaaagcttcatgcaggacgtgatccgcatgcagttcctcggtcgcatggatggcagcgaaggctcgagcggcacgctgtactacttcaccagttcgctgggcaactacgccttggcgtatccgatggcgctgctggtattgctggccatgctgctcagcgggcgccgcgcgccgggaccggcattgcagttggtgtggtattgcgccgccgcgggcttgctggtgatggtcggcctgtcgattccccaggcgaaaaaagcacgttacgtgctgccgatgttgcccatggcggcgatcattgcggcgtacccgttccaggtcgcacacggacggctcttcgccgggctgcgtgggctgctgctggtgatctggacgctgctgccgacgctgttgatcatcggccttttattggcacgaccgcgctaccctgagcagttgagccatctgggctgggtgttcggcgtgctggcgggcctgcaggtggtggccttggtgacactcttcaagcgccgcctgcgtccggtcggcccggcctttgccgcggtactggcggtttgggccacctatatcctggtggtcgagccgctggagcgcagtatctacgacacccgcacctttaccttgcaggttcatgagcaggtgatgcagcagcgcgcgccggtggtgctgcatggcttgggcaaagacgccaaggccatcaagtacatggtcaacctcgactgcgaccaggtgccgttgttcactcagcaagccgccgacctcaagccactccagggacccgcctggctggtgatgagccaagtggattacgaaggtttgcaagacccgcgctttcggtccatcacgccgaccctgaccggcgaattcgaccgtaacccttacgtgctgctgcacctggccaaacctgtgcaaccttgagcctgcgccggcactgccggcgcggaaacttcccacacagctttacgtaataactgctgccgtttctctttcctgcgcccaaaacccgacggtaaactcgcttgcctggtgcggtattcatgtaccgccacaggtcatgggtgaccacaaggacgagaggacaacgccgtgccagatgatgcttcgcttgataacccagccttgaccagcaccgaagtgcatgtcggctacgttcccctgccaccgctggaccggctgatgggattgcgcgacgcgttggtggcgttgaaaggcccgctggccagtgaacccggtttgcaggagaacctgcgcaagcgttttttcgatgaagaactcactaatcgggtgctgggtaaagtctgctgttcgatagccgtctgaacgtattccaattcattatttttgcattcaaccctcattaatatgcattggcgcctctgttccacgcgcggcacactgcatgggttccttcccccaaatgttggaactttcaaagggcttttccgggcaaccagacaagccttttttttgcccgctgtttatggactgccttccaatgctcgctcgctggttccccgctgctatcaacacccgccccaccgaatggagccgtgccgcgatcggtatggcgcttggcaccttgttcagcgtctggttgtgctctcaggtgtttggcatggatgtcgcgctgcacctgcttggcccgctgggtgcgtcggccgtcttgttgttcgccgtgtcatcgggtgccttggcgcagccctggtcgattatcggcagctacctgtgcgcaggcgtgattgccttgctggtgacgcgtgtcctcggcccgtccctgggctgcgcctgcctggcggctggcatgaccgtggtgctgatgtgctggttgcgctgcctgcacccgcccgccggcggcctggccatgacgctggtcctggcagacccggcgtcagcggcgctgggttggtatgaattgggcgcggtattgctcggcgcaggtgcgctgctggcctgcgcactggcgtacaacaacgccacgcgcacgcgttaccccaaaggcgcggcgccagcgccggcacctctcccgttcaaccccagagccggccgagaccctgccattaccgccgctgatttgaaactggcactggcggacatggagcagttctacgatgtggagcccagcgaactggaagagctgatccacgccgcggaaacccacgccaggcgccgcagcatcggtgaaacactggccagccgggtgccttgagcccggcgcgtgcctactgcataaatgcaaaaacgacctgcaggattgaaggttgtactgggcaaatttgcactggtacgatcgcgagaaggttcatccgtgaacatcttgataaagaacaataaaagcagggagttatcgatgactgctcaggtttcatccgaagcaagccacgccgaaatacttcaggacgaagtcctcgccgaggtccgcaaccacatcggccacctcaccctcaatcgccccgccggcttgaacgccatcaccctggacatggtgcgcagcctggcgtcccacttgcaggcatgggccgatgacccgcaggtgtatgccgtagtcctgcgtggcgccggtgaaaaagccttctgtgccggtggcgatatccgctcgctgtacgacagtttcaagaacggcgacaccctgcatcaggactttttcgtcgaggaatacgcactcgatctggccatccaccactaccgcaagcccgtcgtggcactgatggacgggtttgtcctgggcggcggcatgggcctggtgcaaggcgctgatctgcgcgtggtcaccgagcgcagtcgcctggcgatgccggaagtagccatcggttacttccctgacgtgggcggcagctacttcctgccgcgtatccccggcgaactggggatctacctgggcgtgaccggggtacagatccgcgcggccgacgcgctgtattgcgggttggccgattggtacctggatagccacaagctcgccgacctggaccagaagctcgaccgcctgcaatggcacgactcgccgctcaaggacctgcaaggcgtgctcgccaaactggccgtgcaacaattgcccgatgcgccgctggccgctctgcgccccgccatcgaccactttttcgcgctgccggatgtaccgagcatcgtcgagcaactgcagcaagtcacggttgccgacagccatgaatgggcgctgaccaccgccaacctgatgctgacccgctcgcccctggccatggcggtcacgctggagatgttgcgccgcggccgccgcctgcctctggaagactgttttgccctggagctgcacctcgatcgccaatggttcgagcgcggcgacctgattgaaggtgtgcgtgccctgatcatcgacaaagacaaaagcccacgctggaacccgcccaccctgcacgggctggccctcagccacgtcgagagcttctttcatcacttcgagaaggttgcgaaataagccatgcaagacattgaatacacagaagaacaagtgatgatccgcgacatggcgcgtgacttcgcccggggtgaaatcgcaccgcatgcccaagcctgggaaaaagccggctggatcgacgacgccctggtcgccaagatgggcgaactgggcctgctgggcatggtggtgccggaagaatggggcggcacttatgtcgattacgtcgcctatgccctcgccgtcgaagaaatttccgcgggtgacggtgccactggtgcactgatgagtatccataattcagtgggttgcgggccgattctcaactacggcaccgatgcacaaaaacagacctggctggccgacctcgccagcggccaggcgattggctgcttctgcctgaccgaaccccaggccggttccgaagcgcacaacctgcgtacccgtgccgaactgcgcgacggccagtgggtgatcaacggggccaaacagttcgtcagtaatggcaagcgcgccaaactggcaatcgtattcgcggtgactgatcccgacctgggcaagaaaggtatctcggcgttcttggtgcccaccgcaaccccaggattcgtggtggatcgtaccgagcacaagatgggtatccgtgcgtccgacacctgcgccgtgaccctgaaccagtgcagcgtgcccgaggccaacctgctgggtgagcgtggcaaaggcctggccatcgcgctgtccaacttggagggtggccgcatcggtattgccgcccaggcgttgggcatcgcccgtgcggcgtttgaagccgcgctggcctatgcccgtgatcgggtgcagttcaacaaggcaatcatcgagcaccagagcgtggccaacctgctggccgacatgcaaacccaactcaacgccgcacgcttgctgatcctgcacgccgcacggctgcgcagtgccggcaaaccctgcttgtcggaagcgtcccaggccaagctgtttgcctcggaaatggccgagaaggtttgctcatcggcgatgcagattcacggagggtacggatacctggaggattacccggtggagcgttactaccgggatgcgcggatcacgcagatttacgaaggaaccagcgagattcagcggatggtgattgccagagagctgaagaactaccaactctgactgccaatgtgagaggggggcaagccccctcccacatttgatactcagtgtctttgacaccgggttatttgtctttgaactccggcgcgcgcttggccacgaacgccgccatgccttccttctgatcctgcgtggcgaacgccgcatggaacacccggcgctcaaagcgcacgccttccgacagactcacttcaaacgcgcggttcacgctttccttgaccatcatgctgatcggcactgacttgccagcaatcagcgtcgcgactttcagcgcttcttccagcaattcatcggccggcacgatgcgcgcgacgattccgcaacgctccgcttccactgcatcgataaagcgcccggtcaggcacatttccatggccttggccttgcccaccgcgcgggtcaggcgttgggtgccgcccatacccggcagtacgccgaggttgatttccggctggccgaacttggcgccgtcaccggccaggatgaagtcgcacatcaacgccagttcgcaaccgccgcccagggcgaagccgttcacggcggcgatgatcggcttgcggcggttggccacgcggtcgctgtcgctgaacaggtcgtcgaggtagatctgcgggtaggtcagctcggccatttccttgatgtcggcaccggcggcgaaggcttttttcgagccggtcaatacgatgcagccgatttccgggttggcctccaggccgtccagtgcctggttcagctcgctgacaagttgcgcattcagagcgttcagggcttgcggacggttgagggtaatcagcccgacgcggccctggacttcgagcaaaatggtttcgtaactcatgtatcggctccttagagattgcgtgagatgaccatgcgctggatatcgctggtgccttcgtaaatctggcagacccgcacgtcgcggtagatccgctccagtgggaagtcgctcaggtaaccgtaaccgcccagggtttgcaaggcggccgaacagactttctcggccatttccgaagcaaacagcttggccatcgaggcttccaccagggcgggcttgccgctgtcgcgcagtgcggcggcgtaatgcaccatctgccgggcaaccgcgatttgcgtggccatatccgccaggcggaaagcgacggcctggtgctcgatgagtggtttgccgaagctttcgcgttcccttgcgtaatcacgagccgcttcaaaagcggcgcgggccatgcccaccgattgcgaggcgatgcccacgcggccaccttcgaggttggccagggcaatcctatagccttcgccctcctcccccagacggttggcaacaggcacctttacgtcttcaaacaggatctggcaggtatcggaggcatgctggccgagcttgtcttcaacgcgcaacacgctgtagcccggcgaatcagtcggcacgataaacgcgctgatcccgcgcttgcccgccgccgggtcggtcacggcaaacacaattaccacaccggcgttctgcccggaggtgatgaactgtttgcagccgttcagcacgtaatggtcgccttcaaggcgtgcgcgggttttcaggctgctggcatcggagccggcctgcggctcggtcagtgcgaacgcgccgagcatggcgccgctggccaggggcttgaggaactgctctttctgctggtcgttaccgaatgtgagaatcggcacgcaacccaccgagttgtgcacgctcatgatggtcgagcaggcgccatcaccggcggcgatttcttccagcgccatggcgtaggccaggtagccagtgtcgcaaccgccccactgttccggcaccagcatgccgaaaaagcccagctcggccatttcaccgatggcttccttggggaagcggtgctcgcggtcccactcggcggcaaagggtttcaggcgctcctgggcaaattgccgggcggcgtcgctgatttgcagttgttcgtcattgggcagcatggtgattccttaatacaggcattcgacagccatggccgtggcttcaccaccgccgatgcagatggcggcaacgccacgcttgaggcccttctggcgcagggccgagagcaaggtcaccaggatccgcgcaccggaggcaccgatcggatggcccagggcgcaggcaccgccatgcgcattgaccttggcatgggggatctccagcttgctcatggtcaccaggctgaccacggcaaaggcttcgttgatctcgaacagatcgacttcatccaggctccagccggtcttgctcatcagcttgcgaatcgcccccaccggcgctaccgggaacagccccggttcgtcggcgaaagccgcatgcccatggatcaccgccaagggcctgaggccacgtttctgcgcctcggactggcgcatcagcaacaaggccgccgcaccgtcggaaatcgagctggaattggccgccgtcacagtgccgccttcgcggaacgccggtttcaggctggtgatcttgtccagcttggccttgggtggctgttcgtcatgcaggatggttttctgctctttgcccacggtgacctgcaccgggacgatttctgcggcaaagctgccatgggtaatggcttcttgcgcccgggtcagcgaagcgatggcgaacgcatcctgggcctcacgggtaaacccgttatgcagggcgcagtcttcggcaaaggtgcccatcaggcgtcccttgtcgtaggcatcttccaggccgtcaaggaacatgtgatcaagcaccttgccgtggcccatgcggtagccgctgcgcgcacggtcgagcaaatacggcgcgttggacatgctttccatgccaccggcaatcaccacgtcgacgctgccggccagcagtgaatcatgggccaggatcgccgcctccatgcccgagccgcacatcttgttgagtgtggtgcagcgcgtgcccttgtcgagcccggcacccagcgcggcctgacgtgccggcgcctggccgaggcctgcaggcagtacgcagccgaacagcacttcatccacggcatcgggggcaataccggcacgctcgacggcggcgcgaatcgccgcggcgcccagctgaggcgcggtcaggcccttgaggtcaccctggaagccgcccatgggcgtgcgcacggcgctgacgataacgataggatcggtcatggcaaatcctccttacttggccgccatgcgcaaggcaccgtcgagacggatcacctcgccattgagcatgctgttttcaatgatgtgccgcaccagcgcggcgtattcggcgggtttgcccaggcgcggcgggaacggcacaccggcggccagggagtcgcgaacttcaggggtcatgccggccatcatcggggtttcgaagatgccgggggcgatggtcattacacgaatgccaaagcgggccagttcgcgtgcggcaggcagcgtcaggctggcaatggcgcccttggacgcggcatacgccgcctggccgatctgcccgtcaaacgccgccaccgaagcggtattgatgatcacgccgcgttcgccgtcggcattcgcttcggtttcggcgatggcggcggcggccaggcgcagcaggttgaagctgccgatcaggttaacgttgatcacctgggcaaaactcgccagcccatgggggccgttcttgccgaggattttctcgccacgcaccacaccggcgcagttcaccagcccgtgcaaaccgccaaacgccgcaagcgtcgcctgcaccgccgcttcggcagccgcttcctggctgatatcggccacgcagctgcgagcgttgtcgccaagttgcctggccttggccgccacggcgtcggcattcaggtccaccagcatgaccctggcaccggcgccaatcagcatctcggcagtcgccgcgccgaggcccgatgcaccgccgctgaccaggaagctcttgttttcaatctgcattgttgtttccttgaacggtccgaattgtcggaatagtcgccccgcagccgccacgcggcaatggtcaaagccttcaacctgcctgactgttttggccagtcatcgaccgcactgatcatccggtcggcccaagcgattggacgctggcgacgcttgcttctaacctgatggcctgcgccaccaaagaagcccccctgcatgatagtccgccccaaacccaatctccttggcatcctgttctcgctcaagggttcgattgccaagcgtatcgccctgcgcagcctgctggtcacgctgctggcgtcggtgatcgtgctggtggaaaccctgcacccggcgtacttctccaaggtcaatgccacgccgttcaccttgctcgggctgtcgctgtcgatcttcatgagttttcgcaacaacgcctgctatgaccgctggtgggaaggccgcaagcaattgggacagatgatcatcgatgtgcgttcgctgatccgcgaaacccaggtgctcactgacccggctgagcgtgcaggcctgctgcgcagcctgtgcggcttcgcccacggcctggttgcacgcttgcgccatgaggatgaagcctgggccatcaagccgtggggcacgttccaggccaaccaccccaacctccccgatagcctgctacaacagctgggcgcgcggttttcgatgctcgccgagcaaggtgtgatcagcgagtggcgctacacccaatgggaaacccgactggtgagcctcagccaggtgcaggcggcctgcgagcgcatcaagagcacgccgctgcccttcccctacaccctgctgctgcatcgcaccatttacctgttctgcattttactgccgtttgccatggccgagccgctgggctggttgacgccggtgttcacggccattgtcagctacacgttcttcggccttgatgaaatcggcgatgacctggaggacccgttcggtttcgatgaaaacgacctgccctgcaatgccctcctgcgcaccctggaacgcgaagtattggccgccctcggcgaaaccgatctgccgccgcctctggaaccggtggactacgtgctcacctgacgcgggtttgacacccgccgtagtctgaccgaagctggcggctttgctgccctcgctttcggacgcctgcatgtcaaagtcacgccgttattccatcgtcggcctgtgcgccctgctgttgattgtgctgatcacctggtatttctctcgcaccaccccggtagccgtacctgcggccatcgcccatgggtattcaaaagccttgaaacaggcgcgcaacggtgagcccggagcggctcgcgtgctgtatcagcaacttggccggccggatctgtcccccgagcgtcgcgctgcgttgcatgccgaactgccgaactacccaagcccccaggccctgaaactggcagacaaggacctggccagcgaatcaccgctggtacgcgaggccgccatccacagtattgtcggcctggtgccaaccggccaacgcacgctgctgctcggcccagtgctggatgaccccgagcaggatgtgcggtttgccgccgccaacgccttgcttggcctttcgcccgacaccctgggcctgtacttcgggccgttgcagcaggtactggatgaattcgtgaaaaagctcaaggcccaacccgaaacggccgaaggctggattcaactggcgcgcctgtatatccacagcgccctgttgccggaggcgcaaaacgcgcttgagcaggccatgcgcctgcaaccggataacttgcaagccgtggtcgcgcagatcgagttgctggacaaacaagccaagaccgaggagtcgcgccaactgttggcacgccaattggccgcgcatccggagtcagcctacctgcagcatgcgctgggcatgtggctgctgcatcatggcgaacgtccgtacgccctgctcggcctgtccaaggccgtggagctggagccggacaatcaggattaccgctacgacctcgcgaccacgctgcatgcgcaagaggaactggaggctgcgcaacgccagttggaagaaatcatccaacgccacccggccaatcgcaaagcccgggttttgctggtcaattactggaaagagagcggccaactgcagaacgtccaggtactgctcgcgcagcttgagcaacagaatccggacgaccctgcattgcagcaaggcctgtaggccgactcagaatttgttgaaccgccacaaagcgctacggtcaagagaatatggcacgtccacatgggcgtgcatcctctactcgtatgtgacctgagggcacttcttgtctacatccaaagcgcagttatccgaaaaagcggccatcggcattgaaggtcttgatgacattcttgccggagggctctcgcgcagccacctgttcctgctggaaggtgagcccggcacgggtaaaaccacggtcgccctgcatttcctgcaggctggcgcccgcagcggcgagcgatcgctgtacatcaccctgtcggaaaccgaacgcgaattgcggcaaggcgccaagtcccacggttgggacctggatgacaacattcatatcttcgaactcacaccaccggagagcctgctcaacgctgaccaccagcagagcctgctgtactcctccgacctcgaactgggcgaagcgacccgacaaatcttcgaagtggtggaacgggtcaagccgacccgggtagtgatcgacagcctctcggaaatccgcctgcttgcgcaaagctccctgcgttatcgccggcagatcctggcgatcaaacactattttgtgcgctacgacgctactgtcctgttgctggacgacctgaccaccgagtccctcgacaagaccgtgcacagtgttgcccatggtgttatccgcctcgaagaactgacccccaactacggcgccgaacgccggcgtgtacgggtggtgaagtaccgcggccagaaataccgtggtggcttccacgacttcaccatcatgcaggacggcgtccatgtgttcccacgcctggtggcggctgagcatcgtggcggttacaagcgcgagaccctgagcagtggtatcaaggcattggatgccctcatgggcggcggcgtcgagaccggctccagcagcctgatcctcggcccggccggtaccggcaaatcgctgatctcgatgattttcgccgccgccgccgtggcgcggggcgagaaagccgcgctgtttatcttcgatgaagagctgggtctgttgttcgaacgcatgaagaacatgggtatcgacctggcggccctgcaggcaaccggtaacttgctgatcgaacaggtcgatgctgccgagttgtcgccgggcgagttttcgcaccgtgtaagacgctgcgtggatgagcgcgggatcaagaccgtggtcattgacagcatcaacggctaccaggctgccatgcctgaagagaacgcgctgatcctgcacatgcacgaattgctgctgtacctcaaccgcaggggcgcggccacgttcatgaccgtcgcgcaacacgggctggtcggcgacatgcaggcccccgtcgacatcacttacctggcggataccgtgatcctgctgcgttacttcgaggcattgggcaaggtgcgccgggcgatttcaatcatcaagaaacgcaccggctcccatgaggccactattcgcgaataccggatcggcagccagggcatgaccgtcggcgaaccgctggataacttccagggcgtactgcgcggcatcccgacctacatgggcgccggctcgcccctactcaaggatgaggacgcgtgacgggcctctctccagtctccgagcgagcaattgtattggcgccgatggggcgtgacggctcattggcgctgatgatgcttaacgaagccggctacagcggtatcgtcgccagcaacctgggggcgttgtgcgaggcgctggaagacggtgcagggctgctgatcattgccgcggaggccctgcgcggggtggacctggaaccactgttggagtacctgcatcaacagccggcatggtcggatctacccatcgtactaatgacccatcatggcggcagcgagcagaatggctcatcccacctgagcggcatgctcggcaacgtgaccttcctggagcggccgttccatccggtgaccctgatcagcctggtcagcgccgccctgcgcggccgccgccggcaatacgaagctcgcgaccgcttgatcgacctcagcgaaagtgaactgcgcctgcaacgcacgctggagacccttgaacagcaagtcgaggaacgtaccgcccaactgcgcagcaatgaagaggcactgcgccaatcacaaaaaatggaagcggtcggccaattgaccggcggtatcgcccatgacttcaacaatatgctcaccggcatcatcggcagcctggagctgctgcgcaggcgcgtggcccgtggcaagttggacgatctcgacagcctgatcgacctcggggtgacctcggccaaccgtgccgccggccttacccaccgcctgctggctttttcccgccgccaatccctcgattccaaacccgtggagatcaaccgactggtgacctcgatgggcgaactgctgcaacgcagcatcaacgaaagcatccacctggacatgcgcctcgcggacgccctatggacggccgaggccgatcccaaccaattggaaagcgccctgctcaacctggtcatcaatgcccgcgacgccatgcccggtggcggcagcctgtccgtggagaccaccaaccgccacctcgacagcgtgttcaccgctgcctacggcaccttgaaacccggtgactacgttgagttgagtgtcagcgacaccggctgtggcatcccggaaagtgtgatgggccgcgtgttcgacccgtttttcaccaccaagcccatcggccagggtaccggtcttggactctcgatgatctatggctttgcccgccagtcccatggacatgtgaccatccacagtgaagtgggaaaaggcaccaccgtgagcttgttcctgccacgcttcttgggtgaaatgggcactgccaagccccctgaccccgcgatgccgccgttcgccattgcaggggaaacggtattgatcgtcgaggacgacccagcggtgcgcatattggtcagcgcggtgctcaaggaactggggtatgcctttgtcgaagcgggcgatgccgatacagccgtgcctatcattgaatcagaccagcgtatcgacctgatgatcagcgatgtcggcctgcccggcatgaacggccgccaattggcggaaatcggccggcagatccgccccgcgttgaaagtgttgttcattaccggctacgccgaacatgcggcggtgcgcggtgggttcctcgacccggggatgcaattgatcaccaagccatttacgtttgatttattgaccaccaaggtcaaggagatgattcaggcctagacaggtccatctgatgcacaagaaacaggcagtcgtaacagggtctacaaaagagatcccctggaaacaatgcgacattcataagtaagaaaactttggaacgaagtggggtgtttttctcacgcagtgctggcgcaaagcgtacgaataaacacccgatcactagttttcacggatctttcttatgactgttacttcttatctgccccgatctccccatcctgtctacccgccggtaacgcagagtgcatcgccaattgccatgagccaggccccgacagccgctgccacgccacttgctggcgaaacaccccaggccaaaggcgatggggagttaaaaaatgagattatcaaatcgttaattcaatatcagtcgtcctctactcccaaacccgttcagagcatagatgtaaccaacatcccatcgcgctcttcctacgggcaacagctagcactgcacgacggtatcgttaatagcaaggccttcaaacagtggaagatcgataaccaactggatcaggcagacacgttaaccattgacacccaaaaagggaccatcactggcatcacttacggtaagaattatcaggtcaaaaccgttgaccttcacaccttcgccgggtggcctttgctcctgtccgctaccaaggcactgatgcccgaagaaggccgtttgacgctaagtggcgcaggtgatgcaaaaacaacaacggccactaagttgcataacatagcgcgcttttatggcatagagttcccctctttggaggaatatctaaaagaaggcccgggcgctcagctgaaggcagtcagactcctgacctcaaaactctcaacggaaactatcacacccgccaatgcctccgatccctttaaggaagacttgagtcaccaaaagacccagctagcggacctgaacaaccgttttcgaatgagtacggcgttggcttccctgcctcacactactcgccggtcctcggcaaacgatatatacgaagatatggtcgcaagcagagtctacgtagaacctgaatcgtcctatgctcccaaggtcaaccagccgtacaccccgcaagtggacctggtctcgttgatggaaggttatggcataacccctcccaaatcgtatgaagaggtagacacattaacgaaagcactgcaaagcccacccctgagaacgcccgctcatggcaatttggcaggtgcgctgacgcacttgagcattgaagatcagcgcgtgtttcaccaggtcatcaaggaggccctgagccccgaggaagaaacgtccttactggaccagttgacccgtggtattgaatgggatgagaaggcgttcagcgacagtcctcgtctcgccatcgatgcaatgcttaagtcacctttcgctcaaaagttagcaaaagcggctgaagagcgtctgggtaaacttgcctcgcccgacgctatcagcgactgggctttggaagcgattcacacggtgctgggtccgcatgaagatttggaaaaatatacgaccccgaaaaccctcggacttgcaacgttcattatgtcctcgcgcaagtccccggaaagcctggtcaagaataaacctgagttcttgaccaagggcactcattccggggtcagctttgccaccgcatttgcacgtaccgaagcccaggctcccggagctacaagcaacatgacgtatgccgagatcatgaagcgcgctgatctcccccccgtcacactcgcagaccgaatgattgagcaacaggcccaaaacactgccttgaaagactggggtgtgattaacggtgtcctcgtggcgaatgatcagggcgaatataccgagtcgcaaatggaacaggtgcgcgatagtttcagtcaacaagtctccgagttgaacgccgcttctgagacgttttcaaaagaaatccccgaccttcataaacgggccgtggacgcaataaaaaaatggaacccacacttgacggaggagcaaatcctgagcaagtcgctggatgcaaccgaccccgaattactggcctttccaggaccgtattcgcttgtggacgtgttccttcagaagactgatcgttacgatacatacaggagggacaagtttacctcccgcgaaccaagcattgatctcgatacagttgtcatccatgccgatcaggcatccgtcatgaaaggcagctttaacacagatattaaatcctacagtgaagagcatgagtcagcgacacgcgcacagactaaatatttgatttcaaatttaagcctggacgaccggcgcattattgaaaatggaaaaataacagtctcaagagaagtccaggtcagcacgaacaattttggcgccagcaatgtaaagcgtgtgtcacacagcagcgtgatcgtgcgcagcgaagttcaggaagaaggtcgcactcgcgtctactcctatgaaatcgacggggccaccaataccgtccgaaaacgtgatgatttgaaggatattacacctggatcgctacctggcgagttccctaccggcctcacgtcgacttacttggagtccatcattcctgatggcgactatacaacgggtttgctcgaccagcatccgtctggcgcttccgacggtgtacccaatagctactttagcgaacggtcgaagtacatcgcggacgccatggtaaaaagtgtcgatataaagggttatgaggactatttgagagggcaaacaacgtttgatactgaagttcccttttatcagaagatcgttgattttttaaaaggacttattccgggttacaacgccgttgaaaacttcgttgccggcaagtggcaggaaggccttgtcgacctggcatgggatgcattcggctttctgctcgccggggcgacggcgacggtaaaagcgggtgcattcgcagctggcggtgcttccaatacattgctcaaagggggtaagaaactggcgcgtggcgctataggcgcgctcaaccccttggatccgcaaggcttgggtttggccggtgtacaagaagtcataaaaacagtgcaaaggccaggtgtcgcgggcagcaagagcttgcccttcagtggcttcaaatttgacgtcgcgaacactttcaagaacgtttcccacgccacgataggaactgccgatcgtggaggtgaaaaacaagaggtcgcggcgactcagtggaatggcaactggtatgccctcgaccccgtcacctataaaccgtatggtcttcccctgaaggatttcgcagccagttcatgatgaactccgccaaggttgttcactgctcccggggacaaccttggcggtcaatgcacggaccgagcacatacgcattgactactttcatcacgccagtaaccgttggatatgctcctgcagtgtatccagatcaaacggcttggccaggatcggcgcattgcgcgtgatcgggctgttgcagtcgaggatctcctgcgggtaaccgctgataaagatcactttcagctccgggcgcaacagcagcgcaggctcggcgatctgcacaccagagatccctcccggcaagcggtaatcggtgaccatcaggtccaggtgcggcttggtggcgaggatttcgaaggcctgctccccgtcgatcgccttcaacacccgatagcccaggccggccaggtattcacccagcacaaacataatggattcgtcgtcctcgacgatcagaacgacatcttgtgcatcttcactcatgggaagcctttgtccggtcaatagctgcaattacgaccatggggtcacgcagaggttgcgtcgaggtgacgattgagttcatgccgtcgcttgcagcggcaggcacaccctgaacaaggcgccctcgcctatccggctctcgacttcgatggtgccgccatgggccgcaacgatctgttcggaaataaacagccccaggcccaggcccgctgcgacctggctggcggacactcgctcgaattgctggaaaatacgcttctggttgtcttcgctgatcccgattccgtgatcgcgcacctctacgcgggcttcgtcatgctcgctgtacacgcgcacttccaccgggctcttggccccgtagcgcagggcattggtcaacaggttggtgaccacttgctcgatacggaactcatcccagtgcccctctaccgggccgtcggcaaccagcgtcatggatgaatccgccgccgcgacctggggcgcgaagttctgcaccaggctgctgacaagctgtgtcaggtcaaaacgtgccggacggatcgacagtttgccggtacgaatgcgtgacacgtcgagcatgtcttcaatcaggcggatcaggctctggatctgtcgctcgtcccggtcgaccatggcgtgcatcttctccagggtgaacgcggcggcgttgtcccgggccaggtgcatcttgcgcaactgagtttcgaggatcagcccattgagcggcgtacgcacttcgtgggcgacgatagacatgaagtcgtcacgcatacgtacggcctgttccagctcagcctgggtggcctgcaggcgcgtcagcagcagttcctgctcgcgccggctgcgttccaaggcttcgacctgcagcttcatggccttgctttggcggtacaggtcgacgaacacgttgaccttgctcttcaccgcatggatatccaggggtttgtgcaggaagtccacggcgccgctttcgtagcccttgaaggcataattgagttcgcggccggcggcgctgacgaacacaatcgggatgttcttggttttctcggtaccgcgcatcagttcggccagttcgaacccgttcatcccgggcatctgcacgtcgagaatcgccatggcgaactcgtgttccagcaacagggacaaggcctcgtcggcgctcaatgccttgaatacctggcggtcctcgcgcttgatcagcgcttcaagggccagcaggttttccggcagatcgtcgacgatcagcagtttggcctggacagtacttaacatggggaatattccagcgaagccagcagtgagccaatgcggctcaacgtcagaatgtgatcgggtgtgtgcagtgccagggccgcacggggcatgacggcgacacgtgcttcagtgggctcttgcaccacagtggttccgccctgctgcttgacgtgggccaggccacgggcgccgtcctggttggcgccggtcaagaggatggcgagcaagcccgtgccgtaggcatcggcggcggattgaaacaggaagtcgattgccggtcgcgaatggtgcacgcggtcctcctgactcagggacaggctgcgatcatgctccaccgacaggtgataaccaggcccggcgaaatacagcgtgcctggcttgagcacttccttgtcgcgcgcctccaccaccggcatggcaacgcggcgatcaaacacctcggccaactggctgcggcgctcgtcgggcaggtgcagcacggtgatgattggcaggccgaagtctgcaggcaattgggcaaataccgtcagcaacgcctctacgccaccggcggaggcgccgatgacaatagcctctatgccccggacctgtgccgggctggcagcctcttgattcatagctttcggtagatccgttcctgtttgaccagcggttcgaattgcttgccatacgcggagaagtccagggtctccttgctgcccagcaccaggaaaccgcgatgacacagcgactcatggaacaatccaaacgctcgatcttgcaattttttattgaaataaatcagtacgttacggcacgaaattaattgagtttctgagaatacactatcggttgccaggctgtgatcggcgaaggtcacattctcacgcagcgttttatcgaagatcgcgtaatcgtaagccgcagtgtagtagtcggcaaatgaacgttgcccaccggcctgctgatagttggctgtataagcgcgtacgttctccagcgagaagatcccctgctttgccttgtccagcgacgccggattgatatcggtggcgtagatgatcgtacgctccagcaacccctcttcccgcagcaggatggccatggagtagacctcctcgccggtgctgcagccggcgatccagatcttgatcgacgggtaggtcttgagcagcggcaccacttcctggcggatcgcgaggaagtgcgacgggtcgcgaaacatctcgctgaccgggatcgtcaggaactgcagcaactgcatgaacgccgccgggtcgtgcaacacgcgctcctgcaaggcggaaatggtcgcgcaatcaaactgacgcaaggcatgcgccacgcggcgcttgaccgacgccccggagtaatcccggaagtcatagctgtacttgaggtaaatcgcctcgatcaacaggcgcagctcaatatcgctgcttttttccaagaaacttcgctccacttaaatgcgttccatcttcggtagccacacgcggatcagtgagaacaggcgatccaggtcgatcggcttggccaggtagtcgttggaaccggccgcgaggcagcgctcctgatcgtctttcatggccttggccgtcaccgcgatgatcggcagctttttccagcgcgggtcctggcgaatcaaggcagtggcctcgtaaccgtccatttccggcatcatcacgtccatcagcaccaggtcgatatcctcgacttcattgagtttgtcgatggcctcacggccgttacgcccgatgaccactaccgcgcctttgtgctccagggcgctggtcagggcgaagatattgcgcacatcgtcgtccaccagcaggatcttgcgcccctcaaagaccttgtcgcggctgcgggcggtcttgagcatcttctggcgatcatgggacagctgggattcgactttgtgcagaaagagtgtgacctcatccagcaggcgctccggcgagcgggcgcccttgatgatgatcgagcgcgaatacttgcgcagttcggcttcttcatcgcgggtcaggttgcgcccggtgtagacgatcaccggcgggaacgagcagatgtcctcggtggccatgcgcttgagcaactcgttgccgagcatgtccggcagcttgaggtcgatgatcatgcagtcatagacattagtgcgcagcaggtccagggcggcctgagcatagccaacgtcggtgatctcaatgtcatcgtcgccgatcaggcgggcaatgctgtcgcgttgcaggtcatcgtcctccaccagcagcacacgcttgaccttctgggtcagcttggcttccaggcgcgcgaacacgtccttgagctcttcgcgggtggtgggtttgaccgcatagccgatcgcgcccatgtgcatggcggcttccacgcggtcttccacggaaatcacatgcaccgggatgtgccgggtattggcgtgttccttgagacgttgcagcacggtcaacccggaatggtccggcaggcgcatgtccagcaggatggcatcggggacatattcctctgccaggctgtagccttcgtccgcgccgtgggctaccaggcagtggtagcccaattcgtgggccaggtcgaagaggatacgcgcaaagttaggctcatcttccaccaccaggatgcaacgcgtggtaaacggggccttgtcgcggtcatcggcgaagcgcgggatcaggctggcatcggccaccggcagcggcgacaccttggccggagccggtgcgggtgccaccaccacttggcgcggctgctcgatcggtgccacgtcttcccccggctctgcataatgttccggcagtaccagcgtaaaggtgctgcctttgcctggggcactggtcacgctgatatagccacccagcagggccgccaggtcacgggaaatcgacaggcccaggccggtgccgccgtagcggcgattggtggtgccgtcggcctggcggaacgcttcgaagatgctttcctgctggtccggcgcaatgccgatgccggagtcgcgcacggtaaaggcaatcccctcctcagatgcacgcgacaccgacaggctgacctcgccctgttcggtgaacttgaccgcgttggacagcaggttcttgaggatctgctccaggcgctggcggtcggtatacagcatagtcggcgtgccttcctgcacctcgacctggaagccgagcttgcgatcagccgccagcggctcgaacatgccgcgcaggccgtcgacaagccgtgccacgctggagttttccgggcgcatctccagcttgccggcctccaccttggagatatccaggatgtcgttgatcaagttgagcaggtcgttgccggcggaatagatcgattcggcaaacttgacctgttcggcgctgaggttttcctgggggttctcggccagcaacttggccaggatcaacgagctgttcagcggcgtgcgcaactcgtgggacatgttggcgaggaattcagatttgtatttgctggagcgctgcaattcttcggcgcgttcctccagttccagctgggcctggttgagctcgatgttcttgcggtccatggcgtcgcgttgttcggccagggtctcggtctgttcggccagttgctcgttggtctgctccagttcggcctgctgggtttccaggtgggcctgggactccttgaggatgcgcgactgttcttccagctcttcgttggcggtcttgagttcttcctgctgcacttgcagctcttcgttgagctgctgggtctcggccagcacttcctgcaggcgctggcggtaacgcgcggcttcgatggaagtgccgatattgccggcaatcagctccaacagctcttcatcgcgctcttccagcgggcgcaggaagcccagttcgaccacgccattgacccgatcatcatcgctggtgggcatgaccagtacgctgcgcgtcgacccttcgcccaggccggaactgaccttgaagtagtccaccggcacatcatccaggcgaatcaggcgatccagctgggccgcctggccgacgatgccttcgtcgctgtagatcgcttgttcccgctgttcctgttcgcgggagaaaccataggtggccacgcgcttgagaccgccgtgttcttcacgcacatacagcgccgcaacggcggagcccatgtactgggcaaagaactgcaggatattgcgcccgagcatattcagggtcagttggccgagcacctgttcggccagttcggtctggccgtttcgcaaccaggcttgttgctcaaggcgtcgcgcaatcttctgttgtgacgcgaggtttgaactgtaactatttgataatgaaacaagatttttacgaccgatgtaggccagaaagccactcaatcccaatacaaatgccaagtacagggtgacgctgatcaccgtggtgcgggtgacgtcttcattgcgggtgatgcgaaactgctgctccatcgccaccgcgtcgtcgtattccttgcggatttcatcggtcaggcgcttgccgcggccggccttgactgcgccgcggtagtcaccactgttgcgctgcatatcaatcatcgactgggcgtagttgttccactcggcctgcagggcttccaggcgcttgaggcgatccacctgctgtgggttgtccgccaccagctcctgcaggttacgcaggtcggcgatgatgcgcggcttggccacttcatacgggtcgaggaaatgctcgtcgccggtgatcaggaagccacgcatgccggtttccaggtccacggtcagcttggacgattcattgaggttattgataacccggtcggtgtgttcaacccattggatcaccgacaacaggtaagtgatcaggcacacgaaaaacaccgcgctgagcacgcccacacccaggggcaatgcaacatttcggctcagcagattacgaaagctcttttcatcgacggacgaagcgggagtcatgggcatgccttggccaagtgcagaaaacccaggagtttgccccaaacttggggttgaacgctatttttatgccaaatactgtcaggtgactcactgccgattgtgagaccccacgtcaaatcaagccactgttttggctgcttacattagtgaacgcggaggcacaggaacgcaggtcgcagggcattgcactcaatgatgcgccttgaaaaaggcagccttgcgcaagcaaatgcgcggataacgtccaacttcaaagggtatccagccatgaccagtctctacgcggtgtccacatcagccctcaacccacccacgcatgcggccaatcaactctatcgactgtcccaacccacctcgtccgaaagcgtcgcagaacaacaggccaacccggcgccacaaccgacttctctcacaacagccgacctctccaacaaaaccctgattggtaatgcccgcaacctgcataccctgtcgcaagcgctgcacaaaattgccaggacactgggacacaacgcgtctcccccggcggtgctgaacgcactcaagaccaccgcaatggacatccacccgcattcatcctttccaacgcagcctgacacccttgtcacactggagagcttcatccgcggcattggcctgggtctacccaccaaccatttttccttgaccgcgttagcggatgccgtcagtgagagagcggtggcgaacccgtttgggaacttcgggggggcactgtcctggcctgtacctttgagtactgacgatcagcgaacgctgcaggcagcggctctccaatacatcaaggatcacgcggaatcaccggagacgggccacagcctgggaatccttgagttgctcaatgacaacaaacccttgacggatgaggccaaggcagaccccatcaaagcgttggagtcgatcctgaacagcccccgagggcaggcgtttggtcgggcaatgcaagcgcatatgaagggtatcgacaccgccaccagcgcccatgactacgccctgccggcgatctacctggccctgaaccccgaagctattaccaacccgcagcgaaaaagggttgaaccgcacctttggggcgctagcccgtcagcggtggtcgatgcgcaggtcaaacccctgatagacgatggccgggttagcccggagatggccgacgttgccgcaacgataatattcggactgacagcgcctgcgtttaaggtaaaaggccttcccgacaatatcacttatggcagcccggcctcggcccgcctgcagatcgcagtggatatccaggaagcgctgtcacccgggtcggcgatgaccatgggcttcgacgaaatcatgatcaaggccgaaaaggccgcccaggtcgatccagcggtaaccgagttcgctcagaaaaccgcactggtcgattggggggttgtcaacggcctgatcgagagaaaggatgacaaacactacacggacctggaactggatgagctgagaacccaatacaaccgcgagttcgcagagcagatcgacgcacagacgttagccaatgctgaaatacccagccgtaaggacatcgccctcgccaaactgaaagaacgttttggtgaaggaattccgtttgaaaaacccctgttgaaactccagacatccggccatcaatcccccgcaatgccgatctacaatccaaacttgcggcctgaagggtatttttcgatgctcgacatcgcgatgatggaaaaccgtggttacacctggacgaccgctgacccgcgtatccccctcgccgcgatcaacgaaaatcctgttctcggtgtgaatgcagcattcaagcaacaattcgacgaggctattgtttcgcgaaagaaaggtctgagtgcgaccgtcaggcacctcatatccaaactccccttggatcaacgcaaagacttggaatatggaaagctgcgcttctttcatgattcggcgtacagaataaatttcatagacaaaacactgctacacaaatacctcaccttttcgataaaaaccgagcgtgacggcgtgtcgtctgtttatgaggtcgacatcaagaaaggcaccatcaccaagcaacgcagcggcaaaaattacgatgagagcacctatggcccaggctcacggcaaattcatacaaccgagttccggccgtcccgctatagccaggcaaaccagaaggaaaacacgggcgacagcgcagtcacgccaaaaagcttcagcagcgaccgcagccaatacattgccgatgcgttcgttgagcacctggatatcgataacgccgatgttgtgaaagcggccaaaggctctacgcagttggacaaacagttcgaagcacaggatcgcgcggccaactttttcctggacctgatcccgttcagatcggccattgtcaacttcataaacggcaactatgtggcgggcgctcttgatctgacgatggatgtcatggggttcctgaccgctggcgcagcgactgcggccaagctggtcaaggtgggggcgatcgccggctctgctgccacaaagctggccaagggcgcgcgcgttattggagcggcgaccctcagtgcattcaacccgctggggggcgcagacgacctggtatttggcggcgcaaggctactgggcaaaagccctcgggcactggagaaaggcatacaaatgctacgtggcacatcagacagttatgggctgctgaaaaacctcagccagcagtacgacatagccgcaataggcagctacaaggtcggcgaaacaaagatccagacggctgccgtattcaacgatggacaatggtaccgctacgacccgatcaaggctcaaccctacggagccccgctggagaacttcacgccctctgtcgcggcctccgcgggggaaatcaaagggttgactgagtcgaggagcatcgagtggttcaccagttggtggagttcctcccgtcccgacgccaaccccaatttcgcaaaggaattcgaggacttgcggttaagcgccttgaaaacggacgccgaaggattcaaccatggttataacagccagacaccgccgtcgattaccgggtactcaacatccctgagcgttgaacagctcaagacactttcactgcaagccggtccaagtgcgcaacagttgggaagcctgattcgccgtatcgaagacttggaagaactgccgaatacgttctataccaaaatggaaaacctcaaaacgctggatgcggacagtttcaagcagggttacaagtacggaacgcccgactcgataaaggggtacaaggaggggttgagagtccctgaactccaggagctggctttgcaacgtggattgacgacgcaacaaatgggctgtctgtaccgacaggttgaaaagcgtgcgatcacgctcaacctgtccctggccaaaaaattcggcgataacatcaaggccgcgggcggagcgttcgtcccgatgccacaaggtttgtacctcagccaagtcagtcctatctcgggagggcagtgcgcggtgtttgctaactcgatggcctatgccattcaggagggcaagcaaaccacgctgttggagaatcttttcacggtaatggctcatcccgagcatcccgccacccagacatttcaaaagactatgcaaagtttccaggccaagctcaggcatgactttcatgtaggccaatacaaacagcagcggacggctgcgcaaatcatcgagcaactggcgaatgccaacacgtcgacccgcctgatgataggtaatacaacacacggtattaccgcaggcgttgtcgtaaagggcggcgaaaaagaatggttctacttcgatcccaacttcgggttggcaacattcaagtccgaggcgtctatgcgcgccggtgtggaaagtgcaatgagcaccggttcaacgagcgcattattccgtccgaatccggggaccttgacctattctgtctcggacttcagtgaattgaacctgatgaacaccgtcggcagcatcaacggcgtgcatgacctagtggccatcccgctatcaatttcctcccccagattggcctcaagtgtcgcctgacgtttgacggggagtaccggcatcatccgattcctggagatgccgcagtcccttgcgagcccggtagaaacccgaccacagactcatacgggacattccttcccaacaccggcacaataccgacctcggtgagggaacttgccgagatcgccgcgactcattagaggatggcctttccaccgctcacggccaatcctttcactctcgggaatttatttatgtccgccaccgcctccaccatccttgtcgtcgaagacgatgccatcgtgcgcatgcttatcgtcgacgtcctggaggagttggaattcaacgtgctggaggccggcgctgctgaagaagcgctggcactggtgcaaaacactggccaagtgatcgacctgatgatgaccgatgtcggcttgccggacatggacggcaagcaactggctgccaaggtccgcgaactgcgtgcggacctgccgattctgttcgccagcggttatgcggaaaacattgacgtgccagccggcatgcaagtgatcgccaagccgttctcgatcgatcaattacgcgacaaagtcaaatcgatgctgcccgcactttaatttcgacctgtacacggtgccgcctgcatgggcggcatttttgcgtcaggtgttcagagattaacgtgaccttcggtcaataacatcggaaactcaacgctattcagacgctaccctacaaaacgcactcaggaaggacgcaacaacatgattggaaaaccgacgcgcctgctgttggcgagcctctcgatactcatgagtaccggcgcctgggccgacttcacggcaactccggccgaagcccgggccattgccaaggaagcctacctgtatgggtttccggtggtggacatgtacaagacgctctatacccaggccgttgacaaaggcggtgccaacttcaaggcgccgttcaaccagatcggcaataccgcgcaagtgttcacgcccaaggacacggccttcgtcacgcccaacgccgacacgccctactcgttcgtctggatggacctgcgccgcgaaccgctggtgctgaccctgccctggatcgaagacgaccgctactactcggtgcagttgatcgacctttatacgcagaacttcgcttacctgggcacccgcagcactggtaacaacggcggccactacatgatcgccggccccgactggaagggtcagcagccggtgaatgtcgaccgcgtgatctacagcgaaagcaatattgcctacgccctgtaccgcacgcagttgtttgatgaaaaggacctgggcaaggtcaagcagatccaggccggctataaagtgcagccactgagcagctacgtgaaacaacccgcgccagccaaggcggccaaggtcgaatggccaaagcccacggcgaccatgaccgaaggcccgcaattgtttcgctacctgaacttcatgctggccttcgccgcgccgcaggacagcgaaaaagagctgctggcccgctttgccaagatcggtatcgccccgggcgcgccgttcaaggtcaaggagctgaccaccgaacagcgcaaggccctggatgaaggcattgccgacgcccatgccgaatttgccgcgttcaagaaagacaaagtcgacactcaccagatcaccagcggtgatctgttcggcagccgcgaccacctgaacaacaattacctgtaccgctatgccggcgccaacatgggcattttcggtaactcctccgacgaagccacctacatgagctacttcgtcgacagcgaaggcaaacccgccaacggcgcacgccacagctacaccgtgcattttgccaaggaccaactgccgccggccgatgcgttctggtcgctgaccatgtacgacgccaagaccaagcttttggtgcccaaccacaagaagcgctacctgatcaattcgcggatgctgcccaacctcaagcgtgacgccgatggcggcctgacattggccttgcagcaccacgagccaccgaaggccgagcaaagcaactggttgccggcgccaccgggtccgttctacgcggtattgcgcatttacctgcccaagcctgaggtgggtaacggccaatggaagctgccgccgttgacgccgctcaagtaacgccacgcgcccggtcgcaacaatggtgagggcactgcagccctcacctctcgcaagttctagcgcgtaagtttcacgtacgactgatgcaggtccgacgcccagccatcaatcacgcttttcacgtcaccggccttcatcacctgcgaatcgttggacagcggcttgcctgtgcctttgcgcaccacctgggcgagcaccttgccattggcgccatcgaggaactgcgcctcggtgcccagggtggtttcctgatcacggatcccggtgccggtgcttaccgccgccacgacgaaggccaccggaatatactcatagggtttgaggccttcggtcttgctgctcacggcggtgattgctgcacgcaccacgatcacgcctggacctggcgcattggccaggggcagggatttttccagctcacgcttgagtgcctggttgtagtaggtgttgatgccgttgagggtggttagcggaattttcgcggtggcctggggcttagggtagaactgggtcggttcgacgtacaccgcgtgatagcggctcagatccagctcgggatcgacccagcgcatcacctcggcccccgatggagacttggcttccttgagccggctgtagtccgagagaaagccggaatactcatccggcgcggtgatcttgctggcacaccccgccagcccgagcgaagcgatgcacaacgtgcagagcaaatgcctaagtgtcatgtttgaactccctggcggtcgacgttggaacactgagttgtaggtatagccaatcctggcaaaataaccctgttcccatcattcgacgtttcagctgcgttcgcgggggatcaggctttgcaactgcgaggccaggaagttggcgtcgaaaccaaaggtgtccgggtctttgaggccattggtcttcttccacaaccagtcgttcttatccacgggtaataccaacgacacactgccgtgacgtgccgcggtcaggcccatgaccgacacagagatcaagccacccgcgcccatgacatccggcacgaactccaccggtttgccagtgatctgtacggtcagtttctcggtcttgaatgtcgaggtctccaccggcacgctcgggccgctggctacgtaagcttcacggtggacttcaagcaaccccactgtcttcaccggctcaagccactgctcgatctgcccgaacagctcatcgagcttctgcgcccaacgggccgactgcacgtcgaactgctgcttcttgtgcgcttcgctgtcggcgtaatgacgaagcatctcgcccagttgctgtacatcgtccattgcggagttccttgggtgagcctggttgcgaagcctgatcatggcagatgcagccattcgacgtacggcttaaaactgatccgcaacaatgaggtttttctgagcctgttttgttttacccatgcttcctacagtgccgccacttggaaccgtgggaggactgagcatgagcagcacaacaatcggacaggcgtataactataaagtcgtccgccaattcgttatcgccacgatcgcctggggcgtggtgggcatggccatgggcgtgtggattgcctcgcaactggtctggcccgagatgaatctcgatctaccctggaccacttttggtcggttacgccccctgcacaccagcctggtgattttcggttttgccggcagcgcgcagtttgccgccagctattacgcggtacagcgtacttgccaggtgcggctgttttccaaccgcctcgcggcgtttaccttttggggttggcagtcggtgatcgtgatcatgctggtcagcttgccgctgggttacaccaccaccaaggagtacgccgagatcgaattctccggcgcggtgtggatggcagtggtctgggtggcgtacgccattgtgtttttcaccaccgtggtgcggcgcaaaacccggcacatctacgtgggcaactggttcttcggcgcgtttattctggtgattgccatgctgcatgtggtcaaccacctggcgatcccggtggactggttcaagtcctacccggtgtattccggggcgaccgatgccatggtgcagtggtggtatgggcataacgccgtggggtttttcctgactaccggtttcctgggcatgatgtattacttcgtgccgaaacaggtcggacgcccggtgtactcctatcgtttatccatcgtgcacttctgggcgctgatcaccctgtacatctgggccggtccgcaccatttgcactacaccgccctgcccgactgggcgcagtcactgggcatggccatgtcgctgatcctgctggcgccgagttggggtgggatgatcaacggcatgatgaccttgtccggcgcctggcatcagttgcgcaccgacccgatcctgcgattcctggtgctgtccctggcgttctacggcatgtcgacgttcgaggggccgatgatggcgatcaagaccgtcaacgccctctcccactacaccgactggaccatcggccacgtacacgccggagccctgggctgggtggcgatgatcaccttcggtgcgctgtatcacatgattcccaaggtgttcggccgcgagcagatgcacagcgtggggctgatcaacctgcacttctggctggccaccattggcaccgtgctctacatcgcgtcaatgtgggtcaacggcattacccagggcttgatgtggcgcgcggtcaacgatgacggcaccctcacctattcgtttgtcgaggccttgcaggccagccacccggggtttgtggtgcggtttgccggtggtgtgttctttctgaccggtatgctgctgatggcctacaacacctggcgcacggtgcgtgtcgcggacctgaaagtggcgcagcttgatgcgcggatcgcctgagatgtggggcctgctgatggtggtatgcctgtatggcgcggtggagtattgcttgcgcggtcaatcggacaaaagcctggacgacgccagcctgatgcccttcgccgatgacccggaagtggcacggcgagtggagttggcgaccggcaagcaggtgaacgcagtggcaccggaagaggccaaacccgggtggaccaacctggacatgtgaaactgcaccggtcatttcgtgggcaactgcgtatgactaatcaatggtcgatgggtaaggtgaagcgactttccttgtcaggagcatcgcatgcgcaccatcggccttatcggcggcatgagctgggagtccagcgccgagtactatcgcatcatcaaccaacgcgtacgcgaccagctcggcccgctgcgctcggcgcaactgttgatgtacagcgtggacttcggcccggtggaacaggcgcaacatgccgggcgctgggatgacaccgcactgatcctcgaagacgccgcgcgccgtttgcaagccggtggcgccgactgtgtggtgctgtgtaccaacaccatgcatttggtggcgccgcgtatcgaggcggcggtgtcgattccgttcctgcatatcgccgacgcggcgggtgcggctgccgtggaaggcggtacgctgacggttggtctgctcggcaccgcgtttaccatggagcaggatttcctcaagtcgcgcctggccgcccaaggcctgaccgtgctggtgccggaggccgacgagcgtcaggccgtgcacaggatcatctatgaggagttgtgcgtcggcgtgatcagcgaagcgtcacgcaaggtctaccaaggtgtgatcaagtccctggccgcacgcggcgcccaggccatcatcctcggctgcacggaaatcgggctgctgatcaagcccgaacacagcgagctgccgctgctggacaccaccgagctgcatgcgcaggctgcggtggcgttcgctttgcagggctaagccgactggcgcaggcgcgccatgctcacggtgtcgacaaaccggccgtcacgcagggcgtaatcacgcaatacgccttcgacctcaaagccgaacttgcgatacaaccgctgcgccgactcgttgtcggcgtacaccgtgagctccacccgatgcaggttcatccagttgtcggccacgtccagcgcggccgtcaacagccgcgaaccgactcccttgccctgccacgccgttgccacgcccatgccgaacgaaccgacatgggcctggcgcacacgcaggtactgttccaggcccagctggccgatcacctcaccgccatgcatcgctaccagttgcaggcgccgctcgttgtccatcaccaggcgtttgcgccacatctcgaccgactggaaaggcatttgcagcacctgacggcacacggccggttcgttgtagagcgctgcgacgccttcaaggtgggcctcggtgaagcgctggatcacgatatggggttcaggcgtgtgcatggtgtttcatcctttgaaagacacgtggtcgaccagtgtaggggcgacattaagccgatggctagggggctggcacggttgaccacaacgatggccagtcaccgtagccgaccccggtgcaacgcggcatccggtggaactcactgagctgaaagcgcttgccgtcgaacacccaagtggccccgccgccgcagtcaccgatgccacgctgcttgtagaaataactcagggacccggaagcctcgtcatagccgaccgcgccttgcaatgcggcgtcttccaagggcagcggctgcaggtccatcagggtttccgtatagggcgcctggcgctcacggctgctgacattgaactcgcagttgtaggccgcgcagtcataacgtgtcacggtcatggcctggcgcgccgtcagcgcccctgcttttgcctcgggctccccctcttccggcgtgacggcctgcaaggcggcagccaccagcccggcctgctcctgcgcggtcaacggcggtgccggcgaaaacttgcgcagtaccggcgttggcgcccgtggcggcacctcgctggccgcgcccttgccgggtcgagccagggccgtcaggttgtccacgcgaccctgcactgcatccatcaacagcagcgcagcactcaacccgctcagcgatacatgcgcctgttcatcacccggcaactgcaggcgctggccattgcgcagacgctgcaaccagcgccgcgcccctgcgtcatcaatcaccccatacgaatgcacctcgggatcaccgccctggtcatccagttcaacgtgcaattcccgcgtcagctccaggcccaggggctggccgtccagcagcaaggtggaaaggtccacctcctggcctcgataatcaaagcgcagacgcggatacccttgcggacccgcctgatgccagatgtgcaacgtcaatgagctatagtcctcttcatccacgccgctgggtgcgctgagggcgtgacaattgcgcaggttgtcgcaaccgaccacccactgcttgatctcacgcagcagcggtaccgcttcggaggggggttgggcgaagaccggggtggtggcgccggtgagcaacagggccaggaatgcggggcgcaacatggggactctccgtgtcgaaaaggcgcggattgtcccatgttcggggtttgtggcggtagctgtcagggcctggcttggccacgaactcgggctgcgcgcttttccaggtgttgcgcgtgacgctcggcttgctgcttgagggccaggcagtactcaggcaggcaatgttgagcgtctggttttacgacgtcatcggccagacgccgagcggttgcggcagaaataggagtgccgcgtggtttcaaccggcctttgatgatggcagcgcgatcattgaccagcgttggatggttgagtttaagtacttcgacggtggcaatcgcttcgggagtcaggccctctacataaccatcactggagtatcgaaactgccgctcgatattggctgtcagcggggaaacaaacggctttgtcaccgtgttgtaatcggccttttccaccgcgccgtagccgcaagcgactttgctttgactggatggatagcaggcgaccaagtttttgtaagcaatgttgctgtcagcctgttggtgtttttgcggaatgacatgctcaatatggcaactgaactgcgtgccttgatctcgagcctgacactcgaccgctgtcggtagccgtcgcaaggtataggcgcataaatgaaactgttccttcaggagcgcctggcgaaccgcttcgcttgggaaggtacttcccttgccgtagaaaagattgtggggagtgtcgcgatttacccttcgccattcaatcagtcctcgtggttcagagccttttctgatcgacctcacgcttcgccctcctctagcgagcgcaaggagtcaatggttgcttgagcctcaagaacatcgggaattttcccgactctccggtgcaactgcgttaaatatttttgggcggagtcaaggttatcatcgtcaagttcccgatagacctttctgagttgttggctcacatcttggttttgggctaatccccccatgaactcttctataacttcaccactgcgaaggccaagtgagcgctctggatgacctaggtattcaccggttcttaacagcatcacggacgctgctgggagttctcctagtatttgtggcgaatgggtcgtgatgatgaattggcagttggggaatgtcttttcaagatttgcaacaacagtgcgctgccagcctggatggaggtgaagatccaattcgtcgatcagtacaacacctctcccttccagtggatcaggcacctcgcggttgagcagtgtcaaccttcgagccaaatcacctaccattgcgagcaagcacttctcgccatcggaaagctgcaagacgttgaattcgagtttgcctttaagaacagtcattcttagagttggtttacgacgtactctaatatctttgaatccggtgaacgtttctatagcccgtcgaactgctgaaagctcgtgatcccgaaatcctgggaggtcacggctgatttcattttccaggtcttcctggttgcgaaaccagatgaaaaacctcttgaagtcagccccgccgtggccaagggcgtcgtcgtagccttcctcaatagtgttgatcaagcgttcacgaacacgtaacggtacatccagaacagcccgatgaacgtcgtagtaaacggcaagaggcagttgaacggacttgtctcctacgagctcataatgaattgcattgatctcgaacgatgcagcagcgttcttcagcaaagacaaatcactactgcgttctttagggtgctttccagactttcgatttagagctattgcccaatcgatgtcgcgctcgtcctggaatccgacaatgacctttagccttgtgtattctgcccctgccttgatgtcatcttttgacattgctctggacttcgacgcctgaccgacgatccgcgccgtcaaattcgaaagcgtaatcgccaacgcatccagaatcgaagacttgcccaccccattgacgcccaccaaagcgacagtctgcttaccctcgaaatcgagttccatcttctcgataccgcggaaattgacgagggtaaaacgcttgatctgcatgatcggcttccaacgtgcctggccgggtcagccagtcttcaaagtaagcacggatcatagtaattatcgactgatctgtcacggcgctgacggtggcagctatcatcgctgcgttgctacgcgccacacccgtgcaatatcggctgcccgttcgctgagcagacgcggcgcctcagcgcaggcctgttccaggctcatcggaccgctaggcaaggcaaatgccgcatccacgccatgggcatacatctgctcgtagccctcacccaaggtgccggcgatcacaataacgggcacgttgtgctgtcgggcgatgcgcgccacgccgaacggggttttgccgcgcagggtctgggcgtcgaaacggccttcgccggtgatcaccaggtcggcgccgcgtacggcggcgtccaggccaaccagttcggccactacctctacgccagcgcggaactgcgcgcccaggaaggccttggccgcaaagcccaagccacctgcggcgccgctgccgggttcgtcgcgcacatctttggatagcacgttggcgcaatgatcggcgaagtggccaagggcggcgtcgagttgttggacttgctcgggattcgcgcctttttgcgggccgaaaatcgccgaggcgccatgggggccgcacagcgggttgttgacgtctgcggcgatttcaaagcgtacctgcgcaaggcgtgggtcaagctgttccaggctgacccgcgccaggcgggccagggccaggccaccaggtgccagcggttggtcgtcggcgtcgaacagttgcacaccgagtgcctgcatcgcgccagcgccgccatcgttggtggcactgccgccaatcgccaggatgatgcgttcagcgccggcatccagtgcggcgcggatcagttcgccggtgccatgggtggtggtggtgcatgcgtcgcgcaggcccgacgacaccaattgcaggccgctggcctcggccatttcgatgattgcggtgtggctgtcggccaaccagccccaacgcgcctcaaccgctgtaccaagcggaccgcgcacgctgtggcggcgcaattggcccttgcacgccgccagcaccgcatccactgtaccttcaccaccgtccgccattgggcattggaccaactcggcatcgggccacacctgggtcagcccttcggcaatggcctgggcgacgccttcggcactcaggctgtccttgaacgagtcgggggcgatgatgattttcatgggctttctccggtttttatgacgcccatgctgccagttgccaccgccgctgacgccggtccgatgcacaactgcggcggtgctttgttgttcattccgacaaaggctggggcagcagctgaacgccgaggtacagggcgagcatgccgtccagggtcaacgggtcgacgccactgagctcggcaatgcgctccatgcggtagcgcaggctgttgcggtgaatacccaaggcgtcggcacaggcctggctttgcccgtcgtgttcgcaccaactgcgcaaggtggccagcagttgaccattgccgtccttggccaacactttgcgcagcgggttgagcagttcatcgagggcgtcgtcgttgcgatggcgccagagcatcaccggcaggcgatagcggttgagcgtgagcagccgtgactgcggcagcacatcgcgaccataggcgagcaaatcaccgacgcgccgatagcagcggcgcagccccgccagcccatccgcttgcccgcccacggcgacgcgcaggatgctccagccaaggccttcgagtttttccagcaggcgtgggttgtcgaccggcaccgtggccggccggcaccacaacaatgaatactgcgccgagctgacgcaccagctgtccggataacgcgaggtcagccaggcactcaaggcctctgccgattgccccgcgccgagttcgaacagatacggcgtgcgcgccatctgcggcttgagccccagttgctgggcttcgtccaccagccgcggcgagtcgccgctttctgccagcagcagagccagcaggtcatcgcaacgctggcgccgccactgttgctcggcctgctggtggcggtggctcaccagcatctcggcggtcatacgcaccagttcggcgtaggtgcgcaggccctccggctcgccagtgatgcccagcacaccgatcaggcggccgtcatgcagcagcggcaggttgatgcccggttgcacgcccttgaggtgcttggcggtctggccatcgatttccaccacgcggccattggcgagcaccagttgcgcgccttcatggcgggtgttgatacgttcgggttcgccgctgccgagaatcaggccctggctgtccatgacgttgacgttgtggggcaggatcgccatggtccgatcgacgatatcctgcgccaggtcatgatccagctcgaacatgcggctaaattccttgaaaggggtggttgttcatcggcacagcgcaaagcagggttcgctgtgcgcaagcacaaagacagcggcccgccggagggccgagactcttcaggcgatcaacgttaccctcgcatcgcgaaaaatcataataaagagagactcccatgtcacagagcgccgcagccacactggccaccgatgacgataaaaacgccatctacaagcgcattaccctgcgcctgatccccttcatcttcatctgctatctgttcaactacctcgaccgggtaaacgtcggctttgccaagttgcagatgctcgacgcgttgaaattcagcgaaaccgtgtacggcctcggtgccgggatcttctttatcggctacgtgctgtgcggcgtgccgagcaacctggcgttgaccaaattcggtccacgccgctggattgcgttgatgatgatcgtctggggcacgctgtccacctgcctgctgttcgtcaccacgccgacgcacttctacaccctgcgcctgttcaccggtgccgctgaagcgggcttcttccccggcgtggtgctgtacctctcgcagtggttcccgaccttccgccgtgggcggatcatggcgctgttcatgtcggccattccggtctccggtttgctcggcagcccgttctccggctggatcctcaaccactttgctgccggccaaggcggccttgccggctggcagtggatgttcctgctgcaaggtatcccgaccgtgatcctgggcgccctcgcctacttcctgctcagcgacagctttgcccacgccaagtggctcaagccccacgaacgcgcggtgctggaagccgaccaggcgaccgacctggccaacaagccgaaaaccaccagcgattcgctggccgaagtgttcaagaaccccgcaatctgggcgttcggtttgatctacttctgcatccagagcggcgtgtacgccatcaatttctggttgccgtcgattatcaagaacctggggttcagcgataacctggtgatcggctggctcagtgcaatcccctacttgctggcagcggtattcatgctgctggtgggtcgctccgccgacttgcgcaaggagcgccgctggcacttggtggtaccgatgttgatgggcgctattggcctggtgattgcggtgaacttcgccacgacaccggcgattgcgatcctcggcctgaccatcgcgaccatgggtgcgctgaccggcctaccgatgttctggccggtgcccaccgccatgctcagtgcgggcgcggcggcaggcggcctggcgttgatcaactccatgggccagatggccggcttcctcagcccctacatcgtgggctttgtgaaggatgccaccgggtccacggatgtggcgctgtacttactggcggcggtgattgtcgccggtagcgtattggcgttgcggatgacgcgtaccctgaaggcttaggtcgctgcggcaatcagagcagaccgccgccgtcgatatcgatcacggcgccggtcataaagccattttccatggccagcacataccccgccgccacttcctctgcttgccctactcgcccgacaggcaacgcggcgccggccttggcaaacatcgccaggcgctgctcctctgcaaggccggcatacgccggtgtatcgatcacccctgggctgaccacgttgacccggcgcggtgccaactccttcgccaactgtttacccagcgcttcggtggcggcgttgatgccggtcttgatgaactggcccggcgccaatttacgtcccagttgcccggaggtcaggctgatgctgccctgctcatccaggaatggcagtgccagttggatcgcccgcagcgagccccagagttttacgttgaagttgtcctgggcctcgctcagatcggtttcgatcaaggtcttggcacgcacggtgggccctgaggtgtagaccaggtggtcgaaccgccccacgcgttcgaacaagtgttgcaaggaccctgcgtcagtgacgtccaccggttcgctgcgcaggccgtttaccacgccgctggtcaagcgccgcccggccagtaccacctgcgccccgcgcgcagcagcggccttggccacggccgcgccaattccgctgctgccgccaatcacgatgacggttttgccgttgagggaagaagtcatggggaaattcctgattgagaaagtgagggttcatcttcccagcttggcaatcgacgaaaaatcccggtaaaacgacaagatctttaaaggatttttacaaatgagctcgaccctcgaccttgaagtcttcgtgcgcaccgccgacaccggcagcctttctgccgccgcccgcagcctcggcttgaccccggccgccgccagcattgccctcaagcgcctggaaacccgcctgggcattcgcctgctggcacgttccacccgcagcatgcgcttgaccgaagaaggtcgccgctacctggagagcgtgcgcgtcgcactggaggcgctgtccgagggcgagcaggcgatcaagcagcagggccagagcctcagtggcctgctgcaactggcggcgccctcggacttcgggcgcaatgtgctattgggctggctggatgcgttcaagctcgaacacccgaatatccgcctgcaattgctgctcaacgacaccaatgccgacctgttccgcgacaccgtggacattgccctgcgctttggcgtgccccgggactccagcctggtggcgctgccagtggtgcccgaccaccaccgcatcgcctgtgccagcccggattacctggcgcgtcacggcacgccccgggttccgagcgatttagcgcagcacaacacgctgcgctacatgcgtcagggccgcgccaacagcatctggtatttccgccagggcgcggtgttgcaggaggtcgaggtgtcgggcgattacttgagcgatgacggtgaaatcgtgcggcgctgggcgttggccggtcacggcatcgcctacaaagccaacctggatatcgcccaggacatccaggccggacggctggtgccgttgctgcctgactggcaaggcgagccgacgccgttcaacctgatgtgccctcaccgtcttcaagtatcggaacgggtgaaggtgctgcatcgttttttacaagcgcgctgcaagaccctgctgagtccatgaagaaacgcgcccagggcttgtcccagaacggccgagtctggtattgcatggggtacgttcccccgccttgaggagttatccatgatttaccgcacattgggccagtccgggttgaaggtcagcgccttgaccctgggcaccatgatgtttggcgaacagaccaacaccgaggactcgctgcgcatcatcgacaaggcctgggaccagggcatcaattttatcgacacggcagacgtctacaccggcggacgttccgaggaaatcgtcggcgaagccatcgtgcgcaatcgccaggactgggtggtggcgtccaaggtcggcatcggcccgctggacggtttgcccaaccgcagcggcttgagccgcaagcgcatattcaacgcgctggacgccagcctgacccggctagataccgattacctggacatctactacctgcaccgcgaagaccacaacacgccgctggaagtgacggtgtcagcgattggcgacctgatccgccagggcaagatccgctactggggcttgtcgaactatcgcggttggcgcattgccgaggtgattcgcgtggccgaacgcctgggtgtcgacaagccgatcatcagccagccgctgtacaacatcgtcaaccgccaggccgaagtcgagcagatcaccgcggcggccgcttacggcctgggtgtggtgccttacagcccattggcccgtggcgtgctcagtggcaaatacgcgccggacgtcactcccgaggccggcagccgtgcggcgcgccaggacaaacgcatcctggaaaccgaatggcgcgtggaatcgctgcgcatcgcccagcagatccagcaatacacccaagggcgtggcgtggggatcgtggagtttgcgattgcctgggtattgaacaattcggcggtgagctcggcgattgtcggaccgcgcaccgaggcgcaatgggatgcctaccttggggcgttggaggtgaagatcacggcggaggatgaagcgttcatcgattcgctggtgacgccggggcattcgtcgacgccggggttcaatgatgtcgggcattttgtgtcggggcgcatcgcccgcggttattgagctagaccgttcattgtggcgagcgggctaactgtggcgagcgggcttgccccgcgttggnnnnnnnnnnnnnnnnnnnnnnnnnnnnnnnnnnnnnnnnccaacgcggggcaagcccgctcgccacagttagcccgcccccgcagcggactaacgcgaaattttgctgaaaaatgccccaaaacagcgcaaccctctcgcggtaaaagcaccataatcccctgttcaaatccccctcttttcgtatcaatggtttttcgcgaggacagcgtgtctaaaggtgtcgtgttatcggtcttggcctcggtgttgtttgccgtgatgtattacttcacgtcgctgctcacacccttgagcggactggaaattttcggctggcgcatgttgctcaccgtgccgtgcatgacggtgttcatgatggtcagtggcgaatggcgacgagtgtgggaactgctgcggatgctggctgccaggcccgcattgattggtggtgtgctggtgtcttccgccctgctgggcgtgcagctgtggctgttcatgtgggcaccgctgaatgggcgtagcctggatgtatcggtgggttacttcctgttgccgctgaccatggtcctgaccggccgcctggtatggggcgaacagttgtcgtacttgcaacagatcgctgtcttttttgcaggcctgggggtgctcaacgagttgtaccaggctggtgggttttcctgggccacgctggtggtgatcatcggctacccggtctatttcatcgtgcgcaagtacctcaagaccgaccatttgggtgggctctggctggacatggcgttgatgctgccggtggcctggtggtttgtgcaaagcggcgagcaaggctttgcggtgctggatgcgcaccccaagctgtacgcgctgattccgatgctgggcctgatcagcgcctcggcgctggtgagctacatcattgccagccgcttgctggcgttcagcctgttcggcttgctcagctacgttgagccggtgctcttgctgggcgtggcgttgatcctgggtgaagggatcaagggcggcgaatggttgacctatatcccgatctggctggcggtgatggtgctggtattcgagggcttcaaacacctggtacgccagcgtaaagcctgatcggcaggcagcaaaaagcccggccaggttaccctcggccgggcttttttgtgtgcgtcagtcggtggtcaatacaccacgacgcacctggtcgcgttcgatcgactcgaacagcgccttgaagttgccctcaccaaacccatcatcgcccttgcgctggatgaattcgaagaacaccggccccatcaaggtttccgagaagatctgcagcagcaggcgcttgtcgccttcaaccgaggaaccgtccagcagaatgccgcgtgcctgcagctgatccaccggctcgccgtggttcggcaagcggccttcgagcatttcgtagtaggtgtccggcggcgcggtcatgaagcgcatgccaatcttcttcagcgcgtcccaggtcttgaccaggtcgtcggtgaggaacgccacgtgctggatgccctcgccgttgaactgcatcaggaactcttcgatctgcccggcgcccttggacgactcttcgttcagcgggatgcggatcatgccatccggcgcgctcatggccttggacgtcaggccggtgtactcgcccttgatatcgaagtaacgcgcttcacggaagttgaacagcttctcgtagaagttcgcccaatagaccatgcgaccgcgatagacgttgtgggtcaggtggtcgatgaccttcaggccggcgcccaccgggttgcgctccactccgtcgaggtagacgaagtcgatatcgtaaatcgaactgccttcgccgaaacggtcgatcaggtacagcggcgcgccgccgatgcccttgatggctggcaggttcagttccatcgggccggtttcgatatggatcggctgggcgcccagttccagggcgcggttgtaggctttttgcgagtccttgacgcggaacgccatgccgcacaccgacggaccatgttcggccgcgaagtaggaggcaatgctgttgggttcgttgttgaggatcaggttgatctcgccctggcggtacaggtgcacgttcttggaacggtgggtcgcaaccttggtgaagcccatgatctcgaagatcggctccagggtacccggcgtcggcgacgcgaattcgatgaactcaaagcccatcagacccattgggttttcgtatagatctgccatgatttggcgcctcatcattcttgtgttttgaaggtttcaattgccagcaaggatgaggagcacgggcggcgcacaggaaaggcctcgcacactgcgggcgaggaagtcaccaaagatgaggggggagccgagtagcttcatggtgtcatcggtctctgacggcttaggcttgcgtgagcgcaagtccatattcttgtatgcgtaaatcgattctacacagcgtaaccaggtttgtccgtactcttatcaaatccccattacccgtacccgtgcaaggggtttattgcacaggtagatgcccgccaggatcacggccccgcccagcagcatcggctgggtgaaaggctcgtccagcagcaaggcgccgcagatcaccgccgtcagcggattgagcgcgatgaatacaccactgcgggtcgcgccaatacgccggatgccatcgtaatagccgatatacgccagggccgagcccagtacaccgaggtaaagcaggctgtacaactgcggcaggtggatagcagtgagcgcatccagcgtcagccgtccgctcagcaacgtggtggccgcgagcatcagcgttcccagccacaccgaccaggtgacggtctgcaaggggcccaggctctggttcagcgtgcgtgagcccaatgaatagatgccccaccccgccacacagccggcgatcaacagatcgccgcgccaggcgtcggtcgcgccctgcagccccagtgggtcgcggttgacaatgacaaccgccgcgcccgccaggcacaacgcgattcccagcgccttgccaggccccaggcgctccttgaataacaggcaggatgccaggccaatcaccgctgggttcaaggcgacgatcagcgacgcccgcgacgcgccgatgtactgcaagccatagaaaaagcacaggttgtagaaaaagatgccgaagaatcccagcaatgccagtcgccccaactgcggcaggtttggacgggccaggggaatgcgcgcgaacgccatgaacagcaacagcgcgacgctggccagcacaaaacgcaggctggccgccagcagcgggtcgacggcaccggacaaagaacgcccggcgacgaaggtgccgccccagatcatggagacggcagcgagcttcaggtaggtcaaacaatcggttgaaggtttcatcggggtattgctctggcgttggacgggttagcctagtgtttgcccaatacctgatcatcgtaaaatgagtaaacactcatgaccctgacccaactggaaattttctccctggtcgctgagctgcaaggctttacccatgccgccaaccgcctgggtatcagccaatcggcggtgtcccatgccatcaagggtctggagcaggaactgggggtggagttgttccgtcggcatcaagcccatgtggcgttgaccgacatcggcgaacaattgctgttgcgcgcccgcgccatgctcggcctggccaacaccctggagcaggaggccgccgatgcccggggcttgaagcgcggcacgctgcgtatcggctccttcgggccaacgtcgtccaatcggctgttgccgcagatcctgcaaccgtttcgccaggcctaccctgacattgaggtgcatgtcgatgaaggcccggaccgccaggtcatccaatggctggatgagcggcgcatcgacgtgggcttcgtggtgctggagcaggagcggttcgacaccttcgcgttgttcaccgatcagatggttgcgctgttgccggccaaccatcccctggccgaacaccctgccctgcgccttgaagacctgtgcgagacgaccttcatcctgaccgaggccggctcgtcggagctggtctcacgcctgttcgccagcgcccggctgacgccgaaggtgcgttatcgttgcgcgcaactgctcagcacgctggaagcggtaagccgtggcgatggcctcagcgtggtggcccagggttccctgccggttacgccagatccgcgttatgtggcgcgcccactggcaccggccattacccgttcgatcggcctggcagtactggatcgccgccaggcgtcccctgcgaccctggcgttcatacgcgtggcgcagggcctggactatgggcatgtctcaccgctatagcgactggcgatgatggcgcagcgcgccgttgtcatccacggtactgaatcgcaggctggccgcaccggatggcgccttcaggaccgtgtcgaaggacaggtgagtggcggaccgtggggcaaccatgggtgggttgtgatgggggtattcgacgccttcgacaaccagtaccaccgacgccagcgtcacgtgaaacgcgctggggttgcgcactagcacaactgttcgctgcccgccgaccaggcgccaggccaatccgctcgcagcatccactgcgccgttggcaagcgccaccggtcgcaggaacagtttgatccgcgtccgaatcgcccattgcaaggtattgccgcccgtggcgtcggtggcagagggtcgaacactcagcacgttgagccagtacagggcttcctggtcggcaaccggcacaggagcttcgcttggctggtagacaatacgcaacgctgcacctttgcccgcgtcaatgcgtttgatcggcggcgtgagggtgaagggcacatcgctgtattccggtggcaactgcgcgtcacccttatcgatccaagcctggaccagcctcgggctgtcggcttgattggtcagttgcaggctcacttcacggctacccatggggtagatgatgcgtgtacggtccaacaccacgtcaccactggcgatggtagcccacaacgtgccgaaacacgccgccgtccagcagagcaagcccgtactcatcgataactcagggtgaacgtcgcctgcccattggccgttccggcctggatgcgtgcggccgtttgcacgtagcgtgccgtgagtggaatggtaaaggtgccattatcggtggtgcccgccagccactggttgggcgtgccgattgcgctggagtcggggccgtagctcagcagccggtcctggtgcagcaactgcagggccacgccccgagcattcgaatcgctggtaagagacaggcgattgctacggttggctggcgcggtctggtcggtcagggtcaccagcacatcgaggctggcaccggtaccgccggcacattgcaacacgatggtctcggtgacggcccctgcggtgctgccgatgccactgaaatcacgcgccgacaccgtccccaggcgcattgccaggctgggtgtcgagacggaacacgtcggtttgcgcggcggcccgatcaacgtgctgcccagggtgatcatgtgctcgcccgtcgccgagcgcacggcgaagcgggcgatcgggcgggagccgataatgccgccctggatcgtgccggtgacgaagaaaaacaaccgcccccgcaagccccagctcggtattccggggtatatgggcggatgcaaggcgctgataccggtactgaccgcctggggtgatctgttgtcacggtcttcggcaatcatacccatcccgacccccgcgacaccggtccggtaaatcggcatccgcaccccataatgaaagtaaaagctccctgtgaagttcaggtcactgctcagggatatgtagctccagtactcactgaacacatcgtcgtatcggcaaaccatcgcattgggaacgtcgaacgtataaccatccgggttacccagtacttgtccggggctcgggttaacgggcagcgggtcgatggcgggcacgttgatcagagtcggggcggcggcatcgcagtcgccacccgcccgggccacgggcagtgtcagtgccgttaacagcagcgccaggacacaggcggcaaggcgcttcatgggatggccacgcatcgaccttcccacacctgcgcgctgcgctggcgctcggcggaaggtctggacggcaattggtagacaatgacgcaacgtccatccgccgcagcgctccaacgcacagtcagccggccgctgtcgctgatacccctgacaaatgccttgctcgcctgccccactaccccgacttcgcgcccttgttcatcgaacacctgcgcggcaaacggcaagggcttgccgttgtcccggcgcgccttgacgatcacggcgcgaccgctggcgaccttgaagcgcaacagcgtcaatgcgcccagggtgggcacgacactttggctggactccagcagctcgacgtccacgggcatgccattgggatcaagcgtcaccacattgcgccggaatgcttgcaggttgggcgccaccgcataaccatccgcgccgatacgcgcgtggccgttgttgagtgctgccccctgcgcgtttggggcgtgtaccagggcggcggattcgcccaggctctgggacaggatcaatccgtcgggatgagcgaccagcgcgccatctgcgctgaatgccagttgcgcaccctggttggattggccataacccaggcgcatcgccactgcctcaccgcgatagccggtgtaagcattcactgcgctggcccgtgaacctgctgctgcgctacggttggcccaaacgccataatgagcgctggcatcctcccccagcagaccattgagacccagttgctgttggctaccgcgccggtcgccacggtcccaatgctgggtgctggtcaatgtgggggcgcgcagtcccgcacccaccggcatcgacaaggtcagggtgatgcggttatccagccgcccgcgctggccaacatcaccaaagaagagcgcgtcgctgtgttccctcgggctgcgccgctgctcgtcgcgcaggcgagtgtcttcgacacgtgaacgctgcatcgagacattccagcccaggcgtttccaggtagccccgtagctcactgaaaaggtggtctggcgcccctgctgccgccgccaataggcggtggaactgccggacagagttaacgttccgccgcccaattgctggctgacattcagatcgatgcggcttttctgcctggccaatcgctccgcgccatagccttttctcaggccttcctgtgcgctcaaggcatcgtacaaactgaaataccccggcgtggagtaacggtacatgcccagtgcgaagtgagtaccggaggtcggcacgcttttgtaataacccaggcccaggctgtgccccgagcggttgccctgcccgtccagccgtgtgcgggagccggtggcatccagggaccatacgcccaacgcagtgcttgccgcgacgcccaatttgccctggtgatagccctgggtgccggtgccgccaccgtacaccgtcaacccgtccgccacaccgtgggcaagcgtgccctgcaccatcgctggcatgcctgcggacacgccgagctggttcacctggcccaggctcacctgatagtggcgagccccgctgcgcaataacagcggtgttgcggagtacggcaccgtgaacgtgttccgccgcccatccacctcggtcacgctgacggtcaagtcaccgccatacccggtggctggcaggtcattgatctcgaacggacctggcgccaccgtcgtctcgtagagcgtgtagccattctggcgaatggtcacggtggcattgccttctgccacgccacgcaccaggggcgcataaccttgacgggacggggccagcatccgctcatcgctggccagggtcacgccccgtacgcgtacgccttccaggatctgcccgctgctgaaactgtcgccgactcgcaactgcgcctgccataccgggaggctgcgttgcgcaaaggtcgaggtgttttgatagggcggctggccggtcgccgaatcccaggtctgcgcgccttggtgccgcaggcgccagcggccgaggttgaggcccgcattcaggcccagataagcacggtcggtgcccgcgcccgccgtcatgcgggtagtgctgaaggtgtaattgagcaggccggcgttgatgccttcatcccagtaagacgggtcgataaagccacgggggagttgtctgacgtacacctggggcaggctcaccgtccactccagcgcggcggcgtctacacggcttgtcgccgcaggcagccaatccgccagcgcgggacactcggaagccgtgcgcagcgtgccgatgcgctccggtgcgacaccaagttgcagcagcaagtcatggtcgacacagggcacagcatcggcttgtgcgtcagtggtcatgaacgttacttcacggcggcccatgggctggccgttgacaatgatctccataagatgagtgccagggctcatcaggtcgtagcgactgaaccgagacacatcgacggccgcgccctcgctggaaaaggcttgcaggtcaaacaccggctccgcggctgtcgcatgttcaatcgacgtcaatgctgcactgatcagcccggcaagcatcgactgcctgttcacggtcaaagcctcagcgcagcacgctgcggcggtgagaacgcgccatagtcgttgatgtactggaaatgcacctgggcatcggccggaatgtgcggggcggcttcgtggaccgccaggcgcaaggtatcgcccggcgcaaccatcccggtgtcgctgcgcaagaggcgagcatcggcccgtggccccaaggccagcgcaacctcttggaacgtgacatgaaaggccgacgggttatgcacctccagcccctgtcccgtcgccgtcttgtagagcgaccaacgtaattgccccggagcgtcatcgggctttcccggcagctggtcaggacggaagaacactttggtgcggatgcggaacgcaaaccgcagttgattgccttgctcgtcgtccagcggagccgatgagtgaaaccttggcggtacctccagcacattgagccagaacagtgtttcgcggtctttgggcaatagctctcgggaatacaccaggcgcatggcgtggcccttgcccgcgtcgatacggaacaccggcggcgaaaggctgaacggcacgttgctgtcttccggaccgacccgccgatcaccgggttcgacccacgcttggaccaggcgcggtgctgcggcgtcttcgttggtcaattggatggtgatctcagcctggcgctcagggtagatatggcgcgttccgttgataatcacgccggcatcgaccgtcaccggtgcgccgggcaacagtgcggccagcagaaatcccaggcagcgccgggcctttgtcaaacaccccatggctgcgcactcctgttcccggctcgctcagggaaaggtcacggagtactgcaccgccgcctggactggcccattaccggccgcgccagtagcgatgtaccgcgccgcaaatggcaacgttgcaatgccatcgtccggaattgcgggggtggatgtcgtccccagccgcaggtcgatgggccggttcacggccccatcgatgatttgcacctccacattcgccgcgccggaggcggccgtgttgagcagattccccgtcagcgggttgaccccggggctggtgctctcgaacaacaccgccaccgaagacgccgcacaaggggatgccgtaccgcccacgtagatgaaaaagggcttgctgccggccgtatcaccggccgccttcaacgcggaggcctgcactttgtccagcgctaccggaaagctcgccccggtgcccggccctgatccggtccccccggtaatcggacacgtgctgccaacaatatcgccactgagggtgatgatgccgtctgctgccatgacaggcccgacgatgatacccatgaatgtgagaaacgccgctgcccgccttttgcttttcatgatgcgtccaccttagaaaaaccgacgttttgatcataagtaacgtgcgcaaggctgcctactgaccgaacggctaggtatcccgagcttattgcggcgactgcaactatcatcgagacaagtccgacctgccgtgctgacacctctctcatctcgcaacaggcttacatcccatgcccctgaccgtccaaggcccccgcagccgtgccacccgcaacctgatcagcgtgttctgcgccatggtgccgcttgcattgggcgtggtgatcctccattggcaagccgaacgtacccttgaacaaagcacggcccagaccgcacaggaagccgtacgccaattcgacttgatgctcgataacaccgcgctcgccgcccaggcattgctgccgttggcaggacagccgtgtgataacgccgcacagctggccttgcgtgaacaggtcacacgccgcccgttcgtgcgggcaaccaccttgtcctggcagagaaacatctattgcagctcgctgtttggcgaccaatacgcgtcaccggtcaacccggatgattacgtggacggcaagttatggctaatgaatggcaacccggtgacgccggataccgcactgctggtgtaccggctggtcgagcgcgacaaggccgcttttgcgtcgatcgacggctaccacctgaccaacgccctgcggctgatcagcccctacgccgacctggtgctgcaagtggggacccattggctgggggccgatggaaaagtgcatgacacagcggttccggtatttgccgtggcccaccatcatcttgcatccgcgcgttatcactacagcgtcgacgcgggcatgccggctggcgaagtctggcgctacatgcaggcacgatacccggcattgttcagcctgctggtgttttttggcgtggcggcgggagtgcttgcgcattggctgcaaaagcgttcttcggcccctacccatgaactgcgacgggccttgggcgccaacgaattcattccgtacttccagcccgtggtgcgcggcgatacccgtgaatgggcaggctgcgaagtactgatgcgctggcaacaccccaaggaagggctggtgcgacccgatctgtttatccccctcgccgagcattcgggcctgatcgtgccgatgactcgtgccctcctgcgccagaccgccgcgcaactggcgcctcatgccacgcgtttcagcccgggattccatattggtgtgaatatcaccgcacgccactgccaggacctggcactggtggaggactgccgcgagtttctcgccgcctttcccgtgggccaggtgaccctggtgctggagttgaccgagcgcgagctgatcgaacccaccgacattacccgccgcttgttcgacgcgttgcatcaattgggagtgatgattgccattgatgatttcggcaccggtcattccagcctcgggtatttacgcaacttcaatgtggactacttgaagatcgaccagagttttgtcgccatgatcggtgcagatgcactatcggggcatattctggacagcatcatagcgctgtcgggcaagctcgacttgggcatcgttgcagaaggtgtggaaacgcgcgaacagtgtgaatatctggccgctcaaggggtggacttcctgcaaggttacctgtttggaaaacctttaccctgtgatgaatttattaaatcgctggcgcgtcattgaatagccatgcactacctgcactgaaatagttgggtctagagaaaagacatgatttactcgtgacgcattaactactacaatttttcctgcctgtgcagaactcgcgggatgacttctttcctgggtcgccttaaagcgcttggcttatagctttgtctgcagttgatatcagccaactacactattggagtacagattttgtccagactcgccgaatttcgcgcagcagaaaaagcccttcaagagcagcttgcccagctggaatccctgaagaacgatgctggcctgaagaaagaaatcgaattcgaagaaaagcttcaagccctgatgaagagctatggcaaaggcctgcgcgacatcatttccatccttgatccaaacccgggcaagtccagcgcagttgctgccgcacctaaacagcgccgtgcgcgtgtggtcaaggtttaccagaacccgcacaccggtgaactgatcgaaaccaaaggcggtaaccaccgtggcctcaaggcctggaaagaacagtacggcgctgccactgtagattcctggcttcgcggctgatcgtactgcacttataaagagccccgctgacgcggggcttttttattttatgggttcgaaatcgaacttaaataacatttcactttgttcaaaaacgacaggcctcacgcacttaaagtttcaggctgtcgcgcaccgaactgacttcttccttgcttgcttcgtacgcctcggcctgacctgcgtatgaaaaaacatacgccttatcggtatcaaccgcgcccaccaatgtttgcgagagcacgtgccgcccgttctcggttatcacgcaagtagtttccaacgcttcaagacggctcaatgttgtagggtgcatcttgctgcacacgctttgataaccaccctgggcgaaatccttctggatggatttgcgcatctccagcagtacgccttgaagattaaccttatgaccaacttcaatcggcgtcccggtcaactccatgaccatcagggtcgtaccgttttcatcattcttgattgcccgctgccgcgacactgccaggggcttggcaggcgcctggtcatccgccatcgcttcttcaacctgccacccgctaggccaatgaatttcgggctcagcggctactacgcaggaactgcccaaccacaagcacagcatgctcaacaacggtttacgaaattcggtcattacgaaaaacacccaaggtccaaggaccaaagtttgagccccggcacccacaggccgcaaggcctgcgtggctttttcatctggcgaccgggccgagccttgcgtatcatggcccggctgcacggatgccagccgcaagccaaggaaccgctcacatttcagagccgcgtttgccccattttttctggagggcccatgagcctgcacgaactgaacaccttcccgggcgtcactgcccaacctgataccgccaccgccaacttcgtgttcaaccacaccatgctgcgggtcaaggacattaccaagtcgctggacttctacacccgcgtcctgggcttttccctggttgaaaaacgcgacttcccggaagccgagttcagcctgtacttcctcgccctggtcgataaatcccagatcccggccgatgctgccgagcgcacccagtggatgaagtcgattccaggcatcctggaactgacccacaaccacggcaccgaaaacgacgccgacttcgcctatcacaacggcaataccgatccgcgtggtttcggccatatctgcatctcggtgccggatatcgtcgccgcctgcgagcgcttcgaagccctgggctgcgatttccagaagcgcctgagcgatggccgcatgaagagcctggcgttcatcaaggacccggatgcgtactgggtcgaaattatccagcccgcgccgctgtaacgaaaaaaccccatgatcactcatggggtttttcatttgccgggcctggcttacgccggggcagaagtccggatcaggtggtcgaacgcactcagggaagccttggcaccctcgcccaccgcaatcacgatctgcttgtagggcacagtcgtgacgtcaccggcagcaaatacacccggcagtgacgtctcgccacgcgcatcgacgatgatctcgccacgcggtgtcaattccacggtgcctttgagccagtcggtgttgggcagcagaccgatctggacaaagataccttccaggtcgatggtcttgaactcaccactgtcgcggtccttgtacgccaggccggtgactttctggccatcgcctttgacttcgctggtcagcgcgctggtgatcacgtcgacgttcggcaggctgtagagcttgcgctgcaacacagcgtcggcgcgcaacttgctgtcgaactcgagcaaagttacgtggctgacgataccagccaggtcgatcgcggcttccacgccggagttgccaccgccgatcaccgccacacgcttacccttgaacaacggaccgtcacagtgcgggcagaagcacacgcccttggccttgtattcctgctcgcccggcacacccatttctctccagcgagcgccggtcgccaggatcacggtcttggacttgagggtcgcaccgctttcgaagcgaatttcgtgcaggtcaccggcgtttttcgccgggatcaaggcactggcgcgctgcaggttcatgatgtccacatcgtactgacgcacgtgagcttccagggcgctggccagtttcggcccctcggtttcctgtaccgagataaagttctcgatagacatggtgtccagcacttgcccgccgaaacgctcggcggcgacgccggtgcgaatacctttgcgtgccgcgtagatcgcagccgacgaaccggctgggccgccgccgacgacgagcacatcgaaggcgtctttggcgctgattttctcggcggctttttcgatgccgctggtgtcgagcttggcaagaatctcttccaggcccatgcggccctgaccgaagttcacaccattgaggtacacgctgggcaccgccataacctggcgctcgtcaacctcagcctgaaacagtgcaccgtcgatggcgacgtggcggatgttcgggttgagcacggccatcagattcaacgcctggaccacatccgggcagttctggcaggacagcgagaagtaagtctcgaagctgaactcgcctttgagggcgcggatctgttcaatcacttcgacactggccttcgacgggtggccaccgacttgcagcagggccagcaccagcgaagtgaattcatggcccatggggatgccggcgaaacgcaggctgatatcggcacccgggcggttgatggagaacgaaggcttgcgcgcatcgttgccatcggtcttcagggtaatcagcgtcgtaaggctgaccacgtcctgcaaaagggcaagcatttcctgggatttcgcgccgtcgtcgagggaggcgacgatctcgatcggctgggtgacccgttccaggtatgacttcaactgagctttaagattggcgtccaacatacgggcgatttcctgttcattcggtttattgcagacaaaaaaacgcccgagcgaacctcgcccgggcgttctgagggcggatgcagcttacttaagtgcggattcccgcccttgagacttcacagacttagatcttgccgaccaggtccagggacggagccagggtggcctcgccttctttccacttggctgggcacacttcgcctgggtgggcagcaacgtactgagcggccttgattttgcgcagcagctcggaagcatcacggccaacgccaccgtcgttcagttcaacgatcttgatctgaccttccgggttgatcacgaacgtaccgcggtctgccagaccagcttcttcgatcagtacgtcgaagttgcgggagatggtcagggttgggtcgccgatcatggtgtactggatcttgccaatggctggcgaagtgttgtgccaggcagcgtgggcaaagtgggtgtcggtggaaacgctgtagatttcgacgcccagtttctggaattcggcgtagttgtcagccagatcttccagctcggttgggcaaacgaaggtgaagtcggctgggtagaagaacacaacagaccacttgcctttcaggtcagcgtcggacacatctacgaagttgccgtttttgtaggcggtagctttgaacggttttacttggctgttgatgataggcatcgttgactctccgtcaggtttgtagaagggcttagtaagttgatgaggtgaatcctacccactctctacgccgatggctcattggcaaacctgatgctgacgattggttttccctatcaggtgactgtattaatagaagaaatctcaaagcagcggctggctcgccaggctcatgccgagaaagggcgtcgcttcaacatagcgcatggcggatttcatgtcgctccagccgacgtaactcatcaacgacttcaaatcccagccgctgcgatgagcccaggtggcaaagccccggcgcagcgagtggctggtgtagtgctcggcgggaatgccggcacgctccagcgcctggcgcagcagcgggatcacactgttggggtgcaagccctcctcccccaggttgccccagcgatcaatcccgcgaaacaccgggccacgtaccaaagccgaggcactgagccactcgctataggcctgcaccgggcacaggcgcaacagtgccggagtgtgataggtcttgccgagattgtcgcggtcgcttttgctgcggggtaggtacaggctgatccctgcaccgggcatcgcttgcacatgctcgatagagagacgacacaactcgtcgctgcgaaagccacgccagaatcccagcaggatcaatgcggtatcacgcttggcacgcagcaatcggggctggttctgtgtttgcgccgcttctatcgcttcagcgtcaagagaagcaaccacttgctccagatgcttgagctgcaacggttcggcttgcttctcccgcaccgggtgcactgcacgaatgcccttgagcaccttgcgcaccacggacgccttggttgggtcaggaaacccctggctcgtatgccattgcgccagtgccgagagtcgcgacttcagcgtgttgaccgccagcacaccggcatgggcgaccagatagcgcgccacgctgtcgctggtcgccggcaggaacccgccccagctcacttcgaaatgctcgatcgctgcgcgatagctacgccgcgtgttgtcgcgggtggcagcgttgagataacgatccagatcgctcatgggaggcctattcgtactgttgactgacgcattagcggattaaaccgtaatgacacgggataatacgccaatatcccatctgttaaatgatgaatttaaacaagttttatacgtgatatagtatgtatatacataccacgtaccacattacgaaatcgacggagaccccatggctcgcggcggcatcaacaaagcagtagttcaaacggcccgcttggcaatcctcgcccgcggcgagaaccccagcatcgacgcagtgcgtatcgagatgggcaataccggctcgaaaaccaccattcatcgttatttgaaagagctggatgaaagcgaaacccgcaccaccatcaccgaagcgccaatcgacgacgagcttggcgaactggtggcgcgactggcccagcgcctgaaagagaaagcccaggaaccaatcgacctggccctggcgcagttcgaacagcagaaggccgccctgctcgccgaggtgcgagcccttgaggaggcccatggccaactccagcagcagttcgatatccaggccgccgccctggcagaagaaagcgccgccctgcaaaccgccagcaccagcctgcagaccgagcaaacccgcaacgccgggctgagccaggcgtgcagtgactacgagctaaggatcaacgacaaggacgagcagattcgttcattggaagaaaagcacctgcatgcccgggacgcgctggagcattaccgcaatgccatcaaggagcagcgcgaacaggaacagcgccgccatgaaggccagttgcaacaggtacaggcagaactgcgccaggcccaacagagcgccatggtgcgccaggatgaaatcacccaactgcatcgcgacaatgagcggctgttgatcgagcatcgggtgacagcgaaggaattgaccgcactgcaggagcaatcccgcaaagatcaggcccagcagctcaaactgacggaacaggtgagcctgattgacagcgaacgcaccctgcttcaggagcgcctgcgggtagcggcgctggagagccagtcacgccaggaagcactggacgagcaccagcgcaccaataaaacgcttgagctggcgctgatcaaggctcaggccagtgtcgaggcgttgcgcctggctgccgccgttgcagcggcgccagaggcaacgcccaaggcctgatcaacccgctacgggcgtgcgcatggtgacgaactcttccgccgccgtcgggtgcacgccaatggtttcatcgaaatgctgcttggtcgcgcccgccttgagcgcgatcgccaggccctgcacgatttcccccgcatccgggccgaccatgtggcaacccagcactttgtcggtgtcggcgtcgaccaccagcttcatcagggtcttttcctggcactcggtcagggtcagcttcatcggccggaaacggctttcgaagacctgcaccttgtgacccttctctttcgcctcttcttcggagagccccacggtgccaatgttcggcagactgaacaccgccgtcgggatcatcttgtaatccaccgggcgatactgctcaggcttgaacaggcgacgcgccacggccatgccttcggccagggcaaccggcgtcaactgcacacgaccgatcacatcgccgatggccaggatcgaggactcggcggtctggtacaggtcatccacctcaacgaagccacgcttgtcgagtttgacgccggtattctccagccccaggttatccagcatcggacgccgccccgtggcgtagaacacgcaatcagcttccagcacccggccgtctttcagggtggccttgaggctgccatcggcctgtttgtcaatgcgctcgatgtcggcattgaattgcaggtccaggccgcgcttggtcagttcttccttcaagtgcgtgcgtaccgaaccgtcgaagccgcgcaggaacaagtcgccgcgatacagcaacgaggtctgggcacccaggccgtggaaaataccggcaaactcaacggcaatgtaaccgccgccgaccaccagaacacgcttgggcaattccttgaggaaaaacgcttcattggagccaatggcatgttcgcgccccggaatctccggaatctgcggccaaccacctgttgcaatcaggatgtgcctggcggtaaagcgctggccattgatttcgacctgatgcgggtccaccaggcgcgcatgcccttcatgcagggtcacgccgctgttgaccagcaggttgcgataaatgccattgaggcgattgatctcgcggtccttgttggcgatcaaagtggcccaatcaaaattcgcctcgcccaacgaccagccaaaaccgccggcctgctcaaaatcctcggcaaaatgtgcgccgtacaccaacagttttttcggcacgcagccgacgttgacacaggtgcctcccaggtagcggctttccgccacggccaccttggcaccaaagcctgcggcaaaacgtgccgcacgcacaccgccggaaccggcgccaattacatacaggtcaaaatcgtaggccatttcactctcctcggcaggacatcagcataccgacttagatggggctgaaaaacgaaaaagccacccgaaggtggcttttttggaacaggctgcctacagcgtgaatcagtaagccttgccagtcttgtagaagtgctcgtagcagaagttagtcgcctcgatgtaaccctcggcaccaccgcagtcgaaacgacggcctttgaacttgtaggcaatcacgcagccgtctttggcttgcttcaacagggcgtcggtgatctggatctcgccacccttgcctggctcggtttcctcgatcaacttgaagatgtccggagtcagaatgtaacgaccgatgatcgccaggttcgacggagcatcttccggcgccggcttctcgaccatgtcacgtacgcggatcaggccatcaccgatgtcgtcgccggcaatcacgccatacttgttggtttcctgagggtcgacctcctggaccgcaacgatggtgcaacgatacttctggtacagcttgaccatctgggtcagtacgccgtcgccttccaggttcacgcacaggtcatccgccaggaccacggcgaacggttcgtcaccgatcagcgggcggccggtcaggatcgcatggccgaggcctttcatctgggtctggcgggtgtaggagaacgagcactcgtccagcagtttgcggatgccgaccaggtatttttccttgtcggtgcccttgatctggttttccagctcgtagctgatgtcgaagtggtcttccagcgcgcgcttaccacggccggtcacgatggagatttcgttcaggccggcatccagtgcctcttcgacgccgtactgaatcagtggcttgttcaccaccggcagcatctctttgggcatggccttggtcgctggcaagaagcgagtgccgtaaccggctgctgggaacaagcatttcttgatcatatgggtccttacaaagggctgtgcgtacggaattcggcgcagtctaatcaggccgcagtcaccttacaatgggtcctgctggcgttgcgatgtcatcatagagaaaaaatgtcggcgtaagttccgcgcatcttacgaagcgcatctgcaccggcacggccaaaaaagcctgcacctcagtatttccaagggctacgacctttttagcatgcttttacggctgcaacactgacctagaataacttgcgcgtgcccgcgacatttggcgctatcattaggcccttgaaccagaccacgagatacttgatagatgtcagaaccaaaaggcgtgaacggctacctgatcaccaagcgagcggacggttggcacctgatcaacttccacggcgacagcgtcgccggcgcattcgccagcgaaagccaggctatcgctgtagccgaagtgtttgtcgatgaagcaggccacgcttcgagcaagcggcccaagggcaagtaaacgtcaacgccctgtgcaaaaggccccgctgaatggggcttttttgtgtttgtctgtacgtagatggcagttcgctataatctcgccagaacgccccacgacagtgtcagcgcgccctccaacaccctcgatgatgaacctacatgaacaagattctggcactgactgcagcactggcgctcgccggatgcaccaccacctctgatgtctacctgaaaaacggtgagcaaggcctgaccatcgactgctcgggcgaagccaactcctgggcgagttgctatgagaaggctgatgcctcttgcgcaggcactggctaccgtatcgtcggcaccgaaggcacaccttcgctcaaggaaagtgaaaagaccctgggccaggacgtcggcaacttcaaaagccgcagtgtcgtggtggtgtgcaagtaagcgtcgcggctacagctggatatcggcgaacttgatacccaggccacgaatggtctccaccaagtcatccagccgtgggaacgactcgacttcatcctgatcgtccaccaggaaaaagctgcggccgccgcttttcttgaagaatacgatccactcccccaagtcggccggattctgaatgatatgagtggccgatatctggccttcggcctggcgagccctgacgtgttcacgcttcataaaagacttcccgaaaaaacaaatgccgcacaaaccgagggtttgcgcggcatttttgcattgaatggctgagagtttaacggatgccctgcccaatcagcacgccttctacggtttggccgtagagattgatgccgtcattggcgtggaatttaacccgggtcttctccaccgaaccgtcaactagccgcgggtcctgcggtcgttcgtggctgttgacgtaggccgcaacgtcccacgcttgctggtcgctcaggctgccgcccttgcccaatggcatgttgtgcttgatgaaggacgccgccgtattgatgcggtgcatgccggccccccaattgtaagaatccttaccccacaacggtggcatcacgtagctgtcaccgaccttctggccctgaccttcgacgccatggcagaccgcgcattgccctttgtacacctcggcgccttgggcgatgtcgtaacccttggccggctgtgccacgtcgggataaccccggcccggcaattcaacgcctaacggcgccttgctggccagccagtaggcatacaccgaaagcgcagtaatttccgggctgtcagcagccggcggcgtaccgccattcatgctgaattggaaacacccctgcaatcgctcggcaaaggtattgaccttgtcgttcttctttcggtacgccgggtacatagggtaagccgcccataacggcgccgaattggccaggcgcccctggtccaggtggcaattgctgcaattgagcccgttgccgacaaatttcggcgctaggcgccgggtatccacgaacagcgcatagccatccttgaccagcttgccgtaggcgttgtcgggcagctcactttcctgaggtggctggaattgactgaccggtgcgtggccggcgacaggttgcaactgcgattggtcttccatagcaatcgtcgccgcctgggctgacgatatgcccaacaggcccaaggccaatatcagcgggctcatggcttggcctccaacttcaacgctgcgaaatactgggcgacaccctgcacttcttccgaggtcagggctttggcgatatgccccatcaagtcattcggatcattgtgacgggttccgttttgccaagccgtcaactgggccgccaagtaagcggcaggctgaccggccaacggtggaaacgcatcgccgacacccgtaccggccgggccgtgacaactggcacacgctggaatctggcgctcccacgccccctgctgcgcaagtttttgcgcagcgccgacaggcatctcgctgcgatgaaccatttgcgggaccgcgccaggcatcgccgccagcgcctgactgaccgcgtcgatttcagcgtcggtgagcgcagtcgccaagggttgcatcaccgggttggcgcgactgccgtgcttgaagtcttccagctgtttacgcaggtagagtgcaggcaagcccgccaaccggggaaaacccgctgcggccagccctgcgccatcggcaccgtggcaggcgacgcagggcatggcgccgggctgcgaaccgccttcggtgaagatcttcttcccatccaacgcgcaggcattgcccagtagcaacatcagcgcactgcccaccagtactcgttccagagacatcatcacgactccatttttatagttatatgcttaggcgtttatggcataagcctacaaatggtaggggaatgagcccctcgcgacaactcccaaaacgcgccatcaaaaaaagcccggtcccacaatggcggggccaggctttttgatcggattcgaagtggctgggtgaaacggcgcttatgagccggaaatgcactcttcgccggccttcttcacatcaccgggacggatcggcacattggacatgctctcgtagagcttgatactgctaccactggaacggtcttcgatctcgaaaatcgccgacgggtcagccgagaatttctgcggcacgatcacctgcacaccgtccttatggggctcgatctgcggcgggcggcgtgtggcggatagtttgcgcacgacacaggcagcatattcctgcggcttcttcccggaaatgaccgccagggtcggcggggtctgcttgatatctgcaaccgaagcacacccaccaatcgccaaggccagaaccaacacactccacttcatacaaaacctccgataaagatcctacgacagcggggatggtatttttctcccgcccacgtaggatttatccctgataactcggtaaataactgttttaaattgtcgacgtcgttgaagacgggccgataataaacgcgctggggctgataaactccatcttaacctacgtatcgttctgatttttcagaaaaagcccttctggagacaccccccatgaaattcatccaccagcgcgagcacctcaacgagggagacattgttgtcatcgaatgctcgcagacttgtaatatccgtctgatgagcgatgcgaattttcgcagctttaagaatggcggccgtcacacttaccacggtggcgcattcgacaagttccccgccaaaatcaccgcaccgagcactgggttctggaacatcaccctggacgtggtcacgcgccgagccatcagcgtgacccgcaaacctgcgctgtcccacaagatccgcattgtgcgccgtaccagctccaagctgagctgacccgaacaccccacaggacatgaccgtgaccgccactaccaaatacgtgatcaagtacaagctcaatggcgaacgccgctttgagttcgcacaactgcagaccaacagcgtcgaagaagccaagcaagcgctggcgaaaattcacgatgccagtgatgaaatcaccgatatcaatgtgagcaaggcgctgtaagccgatgtccggccccaccgaagatctgttcgccgacgacgccttgcagcaacccgccgggcgcgagcaaattggcgaacagtcctgtgtattgaaaggctacgccctgccctggattgagcgccttctaccggaactgcggcgggtgctggctcagtcaccgtttcggcaaatggtcacaccgggtggttttaccatgtcggcggcattgagcagttgcggcaagttgggctggactaccgacacctccggttaccgttactcacccgtggacccacgtagccagcaaccctggccgcagatgccggataccctgcgccaattggccgtgcaggcggctgcagaggccggtttccctgactttgccccggacgcctgcctgatcaaccgctatgtacccggcgcaaaaatgtcgctgcatcaagacaagaatgagcgtcgctacagcgaaccggtggtgtccgtctcgctcggcctgccggcgatttttctgtttggtgggcacgcgcgtaacgacaagacccgcaaagtctcgctgttccatggcgacgtggtggtctggggcggcgtggaccgcctgcgctttcatggtgtgatgccgatcaaggaaggcatgcacccggtaatgggtgcgcaacgcatcaacctgacctttcgcaccgccggctgatttgaccgcaagcttcagagtgccaggtgttcgcgacccggctaatctggccgggatccgtcaagagtgcccaccatgactaccgaacaagacccgcgctgggcagccatactggcccgcgaccccaaggccgatgcgctgttcgtctacggcgtgaagaccaccggcgtgtactgccgcgccagtagcgcgtcacgcttgccacgtccggaaaacatcgagttcttcgacaccccggcgaaggccgaagccgccggttatcgcgccagcaaacgcgcggccggcgaccagacccagctcgcagcgcagcatgcacaactggtggccgacgcttgtcggcatatcgaacaggccgacaccccgcccagcctgaacacgttggcgcagcacgccaacctcagcccttttcattttcaccgcgtgttcaaagccgttaccggcctgacacccaagggctatgccagcgcccatcgctcgcgcaaggtgcgcgacggtctcaagggcgcgcactcggtgacggatgccctgtatgacgcaggcttcaactccaacagtcgcttttatgagtccgctgaccaactgcttggcatgaagcccagcgactacaaggccggcggcaccaatacggcgatcctgttcgccgtcgggcagtgctcactgggagcgatcctggtggcgcagagcgctcgcggcgtctgcgcgattctgctggggaatgatccggaccaactggtgcgcgatctacaggatcaatttcccaacgccgaactggtgggcgccgacccgggtttcgagcaattgattgcgcaggtcgtagggtttgtcgaagcgcccgcacttggcctggacctgccgctggacctgcgcggcacggcattccaggagcgggtatggcaagccttgcgcgagattccagcgggcagcaccgccagctacgcacagatcgccgagcgtatcggcgcaccgaagtcgttccgtgcggtggcccaggcctgtggcgccaacagcctggcagtggccattccttgccaccgcgtggtgcgcagtaatggccagctgtcgggctaccgctggggcgtggaacgcaagcagcagctactcgcccgagaacaggcgtcgaagacctagcggatcccgatgtggatcaacgccaggtcgtccgcctggtaagcctcgaaatcagtgacaaaggcacggacctgcgcgccaggctgctggaagtaggtccagatctgttgccaggcgttgatgatcgcctccggcatggggcctcgggcttcgaacaccaggtagcgtccggcttctattacaaggctttcaaacccgtccgccggcccagcggtggcaacacccgctgttacgtcaaattcgccatgcgcgtccgactcatagccgctgtacaccccataaatgggtgactcaggcagttttcccgggatgccctcgtacagtccctcactgaaaaatcgctgccacatcgggccgatcttcgcacttgacggtgtcatctcatccgcgttgcgcgtgcgtattttcaagcccgagacgcggattgccgcgatgtgttgctcctgaatgttgtgcaaagccatctcctttaaagcttcagtttgcgtttacgaaattcagcgaccttatgccgattgccacataacgccatgctgcaccaacggcgcttgtgggccttggtgcgatcataaaaccacaagatgcattccggatgctcgcagcgccggatcagattgaaatccccttccaccaacagcgtggcggccgcctcggcaatcggcgccaggaactgttccgccgtctgctgcttgcgctggcgctcaagcgttggcgtctcgccagcacgccacaccagctgcggatggctcactgccttgcgtaaaaagctgttcagcgccgccggattgccgggttgttgcgccttgcgtgcagccaccaattcacgaatcacctcgcgcagctctcgcgcggcgctgagcaaggcgcccggttcaaacaacgggatgccgttctgttcaacccactgcaggcgcaccagccaggcggctacgtcggcatcggtctgccagaaatcccacggcacgccgtcgatattcgcaagagtgttgagcatgtccagcaccggatcgtcggccaggacgtaaggttccgagggggcggcagtgggtggggaaagggtcatggggcaatcctctagtgagcggccacatcgtaaccgctgtttcgacaccaggatagttacaaaaagcacaacgctaacctgaataaatagtttgacaggttacaatattcggcgcagctttttaaaacggtaacccgtaaatcacctcaatcaagttacaaaaggctctccatcatgaccactccaacccctgtcgttcactaccgccacgtcgatgccgatggtgtgcgcatgttctaccgcgaagccggcgctgcaacggcaccggtcatcttgctgctgcacggctttcccagttcgtcgcacatgtaccgcgacctgatccccctgctcgccacgcgcttccgggtcattgcgccggacctgccaggctttggtttcaccgaggtgccggccgagcgcgattacgcctacagcttcgacaacctggcaatcacggtcgggcattttgtcgatgcactgcagttgacccgctacgccctgtatgtcttcgactatggtgcgccggtggggctgcgcctggccgtggcgcatccggaacgggtcagcgcgctggtgtcgcagaacggtaacgcctacctggaaggtctgggtgatgcctgggcgcccattcgcacctattgggccgagccgagccaggccaaccgcgaggtgatccgcaacgcagtgatcagcctggaaggcacgcgctaccagtacctgcacggcgtaaagcagccagagcgagtagccccggaatcctacatgctcgatgtactgctcatgcagcgccccggcaatgacgagatccaactggacctgttcctcgactatcgcaacaaccttgcgctttacccggcgttccaggcgttcttcaaggccacgcacgtaccgacgctggtgatctggggccagaacgacccgttctttatcccgccaggcgcccatgcctatacaaccgacaacccgaacgcggtggtagaactgctcgacaccggccacttcgccctggaaacccatgcaacccatatcgccgaacgcattcacgccgtgctgggcgacgccatcgattgatgatgcaccacgaaacgacgcgttcgtccagtgaataaaacagagtggccggggggcatgggccctgctaaaacagcgaaaagcctcactaacgctggagacgcatcccatgagcacctggccagacacccgccttctcgacctgctgggcattgaattgcccatcatccaggctcccatggcggtgggcacgaccaccgccatggtcatcgccgccaaccaggcgggtgcgctgggctcattgccggcagctgcactgagtatcgagcaattgcgcgatgcactgaccgccatccgccaggccagcccgcgtccgatcaacgtcaatttcttctgccaccaaccgcccgcgccagaccctgagcgtgatcgtcgttggaaggcactgctggagccctactaccgcgaactgggcgccgactttgatgcgccaaccccggtttccaatcgcgaaccgttcaatgacgcggcgtgccaggtcgtcgaagaattgcgccccgaggtggtcagctttcactttggcctgccggaaaagtccctgctggaccgggttaaagccaccggtgccaaagtgctgtcctcggcgaccactgttgaggaagccatctggctggaacagcacggttgcgatgcgatcatcgccatgggcagtgaagccggcggacaccgtggtttgttcctcagtgatgacctcaatacccagatcggcctgttcgcgctgttgccgcaagtcgtcgacgccgtcagcgtgccggtgattgccgccggcggcatcggtgatgcgcgggggattgtcgcggcctttgcgcttggcgcctcggcggtgcagattggcacggcgtatctgtttactcccgaagccaacgtcacggcttcacatcactatgcattgcgccatgcccaggccagcgaaaccgcgctgaccaatctgttcaccggtcgcccggcacggggcatcgtcaaccgggtgatgcgcgagttgggcgcgatcaacccggccgcaccggcgttccccacctccggcggtgcgctgataccgctcaaggccaaggatgaagcgggcttcagcaacctatggtccggccaggcactgcgcctgggcaaagacaccacgacctatgaactgacccgcgaattggcggagcaaacgctacagcgccttgcccgcttcggccgctaggccagcaccgcgtcaaccggctcgaacccactgagccggctttcgtgggccgggctcagcaccgcaaaacggttctggcgcagtgcgctgatgccatacaccacccgcgcaaagtgctcgttgtcatgggcatagggctggctgcgcaggatcagggcaaaaaagcactcgggctgacgagcaaggtccgcgccgcgaatggacgccagccctgtggcgaacaacgcgcggccactggcggctgacaagcgcccgtaactcaccgaacgggaatgatgaaaggcaagctcggcgtccgtcttggcctgctcgtacaacaggtccattgcttctatcgcgaaaagactgacggaggccttgtcgccagtgacataccgctgcacaagttggcgcacgccttcgcgccacgtgtcatcttcctgctcggcgcgcatggcgatccaatcaatgcagtccactaacgcgtcaccgcctgcggtgaggttcgccggcaatcctgattgcagcttttccaggtgcatcagcgcgtgttgcaccatggcagcttctgcgctcatgacctcgctcatcaggtcgagaatctccggcttcggctccccttgccaggtttgcaggaggcccaacagttgcgccctgaggtcgcgaacggcttcgacgccaagggtacggcgcaacaactcctccgactcgttcaccaggctggtaaggttactgacctggctcaacaggtcagcctggctgaacgaatggagcgtttcacgcccgggggcggaggcatcgaacgggctggggccgaactggtggaacacctcgttccacaaccgctggatctgccggtggatctgttccgtataacgcgacggcaagttgatcacgctgcaactgccttcgttgaaaaaccctgcccaactgatgcccagtgcgaagacgccatcgacctcatgactggcgtgtgccatcgactcatagaacttgtagcagaccactttattctgcaatccaggcagcgccttgaggtactgctcccaactacccagcgtgccgaaatagatgcgcttgtcggcgtccggatcaaggtggctgagggcgctgtccatgatggcggtatcaccctcgtgacgcaggcagagtgcaaagtgctgttgcggttggctgtcgtgcaggtcggaaaacaccagcacaccaatgccctggacctcccaaccattcttcagcaggtgttcggcgcaacggctggcctcggtataaccacaggtggtggaaacctcacggtagcccgtcagctcggccaactcattgtcactgcgcaaagtcttgcgcaaacgctcacgcatcgctgccagccaggtgggcgtaagcaggaacacaccctggctgtcgtcattgagcgctacgcttaccggtgtctcggcgggcagcggtacgttgagcacgggcacggcaaacttggcggccagggttgactgcttgagcaggacacgcagcttgcggctggcgatagtcacgtccacccccagatcgaccaagccgagcagtacccccaatttgcactcatggatgtaggccgcgtactcctccgggcgatcactgttctgcgccagtgcatagtcaaagctcacgtcgctgatgttggcgacgaaccggatcatccctgacagtaacagcgcgcccaatccaccggtggggccaatggacgcgatgaccaatgccgacaccacccgcacaaggcttttgaacatgcctgttttcgcgcggcgccgctcttcgtcggaagaaaatacggcgtagtccatctgctgtttgatttccgcgatggccgcctggcgtaactcgagcgcaaggtcttcggtggttcgaaacgtaatcggttgcggtggaaaacgccggtagtgatagccgtagcgttttttccgggggtggaaatccttgcgcgtcaggctgaatttatccaccggcggcaagtgcgcaccgatgaaggtcatcagcttctcactgggctgacctggcgccgtgctgggctgccactcaacccacttggggcctgcgatgttaagcgataccagcaacgctttgttggacgaaaacgccacgaccaaggcgttcggtaccaccttctccttgaacagcaacgcctgtggcttgaggtcgcccttcaggtatcgaaaggcgactgcgcgcaattcaacatcctgctcttgggtatccgccataaactggccaactcgcacccgggcaacggcgtcgcaggtgtcatcgaacaacttcttgaagtccgcgctattggaaaggctgtcgacatcggccaggaattccgcgaccagggtatccctcaaaccggacaccgctttgatttctgagggtgacagcggctcgccgtccaagtgtatttcgccgactttttcccggtaaaacgcactgcgctgtggctcgccgatcatcacctgggcgaaggaaaaatatttgtagcgcggtggactgtaggccgacatgcccgacgaatgcatggggtaacccaccaggtacttgtagcgaaaacgtttaccggtctctatccgctcggtagttccgttcggcaggccggtcttggccaggcaccgtttgactagcgattgaatgtaggtcttggtgagctgggcgttgcccacgcttcgggccaagccatcccacttctgccaggctctgggagctctcggcagttgatcgacgggcggaaggcgttgtggccattgtgtagtgtcccgggcgacgatctgtacagtaatcaatgcctgcgccgcatcatttcgcacataccagcggttttcctgatcgctgctgaccgagatcaattggtcgtcggccagcacgccacagttgacccattggcagcgatgattcatgtagacgctcaagtaatagccccatttggctcgcgaccaataggcctgcgggatattgacggtgtaggtctgttccgcaggtgttcctggcagtcgccgtagggtcacgaccacgcattgatcgacgccgatatcgatgtcgggcagcaccactgaaccggagacccagcggggcagaatcataaagtcgacatcggcgacgggctcgtcgaagggtacgagccaaacctggttctttgtcgggtccctggaatagtcgatgtagtcccccgaccgcgcgccaatccgcaaaccgggccacgcggtactgattgccttgggccaatcctttaacgacaacgcgatcaacggcacatcgaaccagatcttcgccagcaaccggttggtggtactccagacactgcacagcactacttcggtcttcaccaggttcctctcgggcaacaccagggtataggacgtgccggtggtaaccctggattgactggcggtacggatgctgtcgagaaagaatcgggtgaacgtcagttgctcggcgacggccccgtaatagcgtggcatccggggttcaacccgtaccgagcttttttgccatttgccaacgaaattcttccagtcataacgatcattaagcaagtgccacaacggcacttcctcccaggcctcaataatcggcgcttggtcggtgtcgtcagggtcggcgtagaccgagaacttcaccggcaccctggaagtggtcttgatcagcgccttggcctctggcgccagcctggaccgttgcaggacacggtcatcgatccagtgctgtatctggctctcggacgaggcaaggctggtcgccccgacgctcacataggcgtagcttttctccatgggttgttccttcccgaaagcgcctcactatccttgcatcggctgcccatggatgtaggccgcccatcgagtgatgcagagaaatctcggcgcatcgacgacggctttttttctgcttgccatttattcgctatatacctatacatacagcgttttgcagccctccagcacttctccaactacacaggcatcggagccgcatatgactttcagcaccaccccgcgtttagtatcgacctgcctggcgacgtggatcgccctgatggccaccgccgcccacgccgatgaagtccaggtggccgtggccgccaacttcaccgcgccgatccaggcgattgccgccgacttcgaaaaagacaccgggcataagctggtcgcggcctacggtgctaccggccagttctacacccagatcaagaacggcgcgccattcgaagtgttcctgagcgccgacgacaccaccccgcagaagcttgaaagcgaaggcgacaccgtcaagggttcgcgcttcacctacgccgtcggcaccctggcactgtggtcggcgaaggacggttacgtcgacgccaaaggcgacgtgctgaagaaaaacgacttcaagcacctgtcgattgccaacccgaaagccgcaccctatggcctggccgccacccaggtattggccagggaaggtctgaccgacaaggtcaaggacaagctcgtcgaaggccagaacatcacccaggcctatcagttcgtgtccaccggcaacgccgagctgggctttgtggccttgtcgcagatctacaaagacggcaaagtcaccagcggttcggcgtggatcgttccggcgtccatgcacgacccgatcaaacaggacgcggtgatcctcaacaagggcaaagacagcgccgctgccaaggcactggtcgaatacctcaaggggcctaaagccgctgccgtcatcaagtcctatggttacgagctggccaagtaaatgccgttatcgagtgccgatttttccgctatctggttgaccatcaaactggcctcactgaccaccgtgatcctgctggtcatcggcactccgattgccttgtggctgtcgcgcacccgttcctggtggcgcggccccatcggcgcggtcgtcgccttgccgttggtgttgccacccacggtgatcggtttttacctgttgttgaccatgggccccaatggctacttcggccagttcacccaatggttgggcctgggcaccctcaccttcagcttcgccgggctggtgattggctcggtgatctattccatgccgtttgtggtgcaaccgttgcaaaacgccttctccgccatcggcacacgcccgctggaagtggccgcgaccttgcgcgccaatccttgggacaccttcttcacggtgattttgcccctggcccggcccggctttatcaccgcctcgatcctgggctttgcgcacaccgtcggcgaattcggcgtggtgctgatgatcggcggcaatatcccggacaagacccgcgtggtctccgtgcagatctacgaccatgtggaagccatggaatatgcccaggcccattggttggccgggtccatggtggtgttcgcgttcctggtgttgctggcgctctactccagccgtaaaaccaggatgggctggagctgatgtcgatgatcaatgtacgccttaacctcaagtacgcaggttttgccctcgacgtggacctgcacctgcccggccgtggcgtgaccgcgctgtatgggcattccggttccggcaagaccacctgcctgcgttgcatcgccgggctggagcgcgccgaagacggcttcatccagatcaatgatgaagtctggcaagacagtcgtaacgggctgttcgtgccgccgcataagcgtgcgctgggctacgtgtttcaggaggccagcctgttcccgcacctgtcagtgcgcgccaacctggagttcggcctcaagcgcatcccgcgccaacagcgccgggtggatatggcccaggccactgagttgctgggcatcggccatctgcttgagcgccacccccagcacctctccggcggcgagcgccagcgcattggtatcgcccgcgccttgctcaccagcccgagcctgctgctgatggacgagccgctggctgccctcgacagccagcgcaagggtgaaatcctgccgtacctcgaacgcctgcacgatgaactggatatcccggtgctgtacgtcagccatgcgcaggatgaagtggcacgcctggccgatcacatcgtactgctcagcgacggcaaggccctggccagcggccccatcggtgaaacgttggcgcggctcgacctgcccctggcgcggggtgacgatgcaggtgtggtcatcaacggcacggtcaacgcctacgacgaccactaccaattgctcacgctgcaactgcccgccagcgccctgcacatgcgcgtggcccacgcaccgctggcgttgggcaaggcgctgcgcatcaaggtgcaggcgcgggacgtgagcctcagcctgcaagccgaggagcacagcagtatcctcaaccgcctgccagtcaccgtcacccaggaaattgccgcggacaacagcgcccacgtgctggtgcgcttggacgcaggaggcacgccgttgctggcgcgcatcacgcgattctcccgcgaccagttgcaactgcaccccggccaggcgctgtgggcgcagatcaaggcggtcgccgtgctggcttgagcaatcttttggcacgaccgcatacggctgcggtcaatcagacataccggcctgatgtgttgccaaggaacccgccccatgtccgattctgcgctgccccgcgacctgcattacgttgacgacacccagcccggcatccgtcgcaagacgctgcggggcaagttccagtacttcgaccccaagggcgagcgcatccgcgatgccgacgagatcaagcgcctgaatgccctcgccgtaccgccggcctacaccgatgtgtggatctgcgccgacccgcaaggtcatctgcaagccactggccgcgatgcacgtgggcgcaagcagtaccgctatcacccgcgctggcgtgaggtgcgcgacagcgacaaatactcgcgcctgcaggaattcggcaacgccttgccgaagctgcgtaagcagttggaagcgcaaatcgccgaacccggcttcacccgcgaaaaagtcctggccacggtcgtcatgctgctggacgccacgctgattcgggtcggcaatacccagtatgcgcgggacaacaaatcctacgggctgaccaccctgcgcacccgccatgtggacgtcaaaggcagcgagatccagttccagtttcgcggcaagagcggcgtcgagcatcagatcagcgtcaaggatcggcgcctggccacggtggtcaagcgctgtatggagctgccgggacagaacctgttccagtacctggacgaagacggtgagcggcacaccgtcagttcccaggacgtcaatgactacctgcatcgcctgaccggtgcggacttcaccgccaaggactaccgcacctgggccggcaccgccatggcgctggcggtgttgcgcgagctggaatggcagcctgagtcggatgccaagcggcatgtggtggcgatggtcaaggatgtcgccaggcaactgggcaacaccccggcggtgtgccgcaagtgttacatccaccccgccgtgctggagcatttcagcctcggtgaactctccaaattgcccaagccgaggctgcgcaaagggctcaaggccgaagaagtggcgttggcgatgttccttgagcaactggcggcggacttgccgaaaaaagccaaggcgggttaggctctgcctcccttctgatacgcaggacgaccgccgacgtgaaccactaagccttccaaaatgtatctgcaacgagccgcctggcgcgcttgttggcctgtccgacatttttttggaggtgctgatgactgacgtcaaccggctgcccgtgcttgtttccctgcaacacttatccttccagttcgccaatggcgacacgctgctggatgacctgaacctgtccatcgattacacccccaccggcatcgtggggcgcaatggtcgaggtaaaagcgtactcgccaaattgatcgcggggctgctgtcgccctcctccggctcgttgaactgcccgaacagcgtgatctatgtcgcgcagaacgtcgtggtagcaccaggcgataccgtcgccgatcttaccggcacggctgcgatattgaccgcccttgagcgtatggccgcaggcgccgcacagatcgatgaccttgaattgattgatgatcgctgggacttggccgagcgcttgcgtagtcgcttggataccgcagggttgtcgcggctttctgttgatacccccacccgtcaactcagcggaggccagttggccagggtcgccgtcatcggcgcgctgctagccgcgccacagttgctggtgctcgatgagcccaccaaccacctcgacagcgatggccgcgcctggctgctgcgtgtcctcgacgaatggcgtggcggcctggtggtggtcagccatgatcggcaattactcaacgccatggggcgcatcattgaactgtcgccgctcggcgtaaacgtatatggcggcaactacgacgcctatcgacaacagcgcgaggctgaacaacacgccgccgtcgccgcgctggaacacgcccgcctggaacgcagccgcgaaaaacggcgcctgcaaaaagaccacgacaacctgcaacgccatgccgcccgctcacgcaaacatgcggaaacggccaacgtcgatcgcttcaccaaagcgcgctggaaaggcgccgccacgcaaatcctcaacaccgtacgcagcgcgcatgagcaacacaaacaggagctggatacccaggtgggccaagcctatgcacgggtcgaggatgaaacaccgacgctgttggcattgcctgcttcagcggtgcccaacgggcgacaggtgctgtcgttgatcgacgcgcaattaccctggctgccgtcgacctgcctcaacgtccacctcgtcggcccggtgcgggtggctgtgcatgggcccaacggttgcggcaaatccacgctgctcaaagtgttggcgggagaatggcgtgcagaacgcggcgaatgccacgtgcacgtacccagcgcctacatcgatcagcacatcgcgctgctcgacgaccatcgctccatcgtcgaacaactgaacctgctggacaccccgctggcggagggtgaattgcgcacgcgcctggccctgctgcaactggatgccctgcgtgtgacccaacccgccgggcaactcagcggcggcgaacgcttgaaggctgcgatggcggttgccttgtggcgcgcagtgccggcgcaattgctgttgctggacgagccgaccaaccatttggacctggaatcggtgatggcgtttgagcaagccatgcaaggttttgccggggcaatgctggtggtgtcccatgacgcggcgcttgtgcaggcgatcaggccgacgcactttctgaattggcatcctgcgggttggaccctgacgcctgcctgaggtcattgcatgcgcgcttaaagcgtcctacggtagtggccggataatctcaccgaggaacccggccctatgttgccttcgccacgaaagccctacgtcaatgccgcactggcccatcgacaacgttggcgtggccgcgtcggactgatgctggtggccagcctgtcggtgctggcgggcatgaccgatgccatcggcttcatggcgagcggtgactttgtttcgttcatgagcgggaacactacgcgcctggcggtggcgataagcgcgggtgacctgggcctgaccgggcggctgctgttgctggtggcgacctttgtggtgggtaacgcgctgggcgtggtggtcagccgactcagccgtcgccatgccctgcccttactgctgtgtattgccgccttgctgtgcggcggtgcactgctgcccttcgccgataccttgcccgcgctgctggcggcgatcatcgcaatgggcatgctcaatgctgcggtggaagaggtcaacgggctgccggtgggtctgacttacgtcaccggcgcactgtcacgctttggccgtgggctggggcgctggctgctcggcgagcgccgcaatggctggcgcgtgcagttgatcccttgggccgggatgttcgtgggggcagtaatcggtgcgctgctggagcagcaactggggctcaaggcgctgatcgtcagcggtggattggcggggttgctggggctggtatcgctgaagatccctcggcgctggcacctgggtttcatgccgcgctgagggctaaaaaggagctcgcccgacgtttaggcctcgacgtccgtgtactggtaaagagccatcatgtcgggcgagcgggtgaatcataagcgaatgccttgcggctgtcgtgccaggcatttcctaaatcgactaaggcaacggattacaggcaggtcgccagtgcggccaaacgacgcttggccggcatattgtcttcgatggcgtagtacttgatggtggaaccgctgcccgcgctctgcacatcgacaaagtaatcgccggcggtggtgtacaccgtgaagccacccgcgccgattggctccttgaagccgccggcgtcaacgccgaacacactttcgtcctgccagccgaactgtacgcactcggcaacgaccagggtggccttgtccgaagccagggtcttgtaaggcgtgcctgcgcgcgcctctttcatcttcgaacccgcgcaaccggccagggccgccagtaccagtgcgccaattaccaccttgtgcatgccattgctccgttggaaaaaaacgcgactgtaccattgccactggccggactgatggccgcatgaactttgtttcactgtaaaggggcaaggcgcgacctatagtggtcacgctcatttttagaagtctcccttcggcccgctctcccgcgggctttttttcgtcccggttgtgctcagagcagccagcggaacagatagaacaacgccatgctcagcagcaccgtcatcagcacattgcgcgtccagaacatcaacgccacggcgctgatacccgccagcaggtaagggttggccgggctcaggttgagctggtggtcggccaggaaaatgatcggcccgcaaatcgccgtgagcatgcccggcaccgcgaatcccaaaaactcgcgcgcgccacggttaaggcgcaccggcaggcgtggctcgataaacaggtaacggttgagaaacaccaccaggcccatggccacaatcatgatgtagatcattgctgccccactcccagtcgcttgcaggcataccctgcgctcatgcccagcaggccggacaccaccaccgccgactcccaatgcaggaaactcagccacaccgagaacaacaacgacaccgccacacagaccaccgtaggaatgtcacgcaccaccggcgtaatcaacgcaatgaaggtggcggcgatggagaattccaggcccagctggtcgagaccgggaatgctcttgccgagcacgatgccggccagggtgaacaggttccaggcgatgtagaacgtcaggccgacacccagggcataccagcggttgaaagtctcgcggtcatagtgactgaccagcgcaaagaattcgtcggtcagcagaaagcccaggctcatgcgccagcgagttttaaggggagaaaggaccggccgcaaatgcatgccatacagcaaatgctgggaggtcagcagcaaggtggtcagcacgatggaaatcaggctggcgccgctcttgaccatgccgatggcaaccagttgtgcagcaccggcgaatacgatggcagacaggccttgggcttccaacggagtgaattgcgcatcaatggccatggaaccggccaacagtccccagggcgcgcaggccagggacaaaggaatcacggcgatggcgccgcgagcgaaggcgtaatgaggtaaggcagtaggcatggaaacggctcatcgacagacagtcgacaagcatgccagcgcaacagtggcgttgtcttgaacgatcttgctcaggcgagccgcaccgacacctgctccaccgaatcacgcgcttcgcgcagttcgtgggcatcctggttaagtcggtgaatggtattgagcaggcgctggcgcagcacttcatcgccgagtttctcgacggcgcgcatcaggtcgaacgccgcggtttcgttattttccgcgacggaatccagggtcttgcgcaggttgcgagtggcacgggtcacgcgggttcttccttcatcagcaatgggcaggcactttaggacattcgtgtttcattttaatttcaaacacttgtggtgattttcgagacatatgatccaagtcaattgaaacgggatttgacctacacatatggaaatacgtatattcggataaccatatatacgaaggccttgaccatgtcggacctcatctcgccccccaccctattcaaatgtctggccgatgccacccgggcacgcctgacgttattgatcctgcgcgaaggcgaactttgcgtgtgcgaactgatccatgccttggacgacagccagccaaaaatctcccggcacctggcgcaactgcgcagttgcgggttgctgcaggaccgtcgtcagggtcaatggatctactaccgcatcaatcctgcgctgcccgagtgggtgacgcaggtgctgcacaccaccctgcaagccaaccagccctggttgcacaacgacgcactgcgtctggatgcaatgggcgaccgaccacaacgggccagcagctgctgctgagccatcggagcgtttatccatgcttgtcgccattgcgatttttatcttcaccattgtcctggtcatctggcagcccaagggcctgggcgtcggctggagcgcaaccttgggcgcgatcctggccctggccttcggcgtgatcagcctggctgacattccggtggtgtggcacatcatctggaatgccaccggcacttttgtcgcgctgatcatcatcagcctgctgctggatgaggctgggtttttcgcctggaccgccttgcatgtggcgcgctggggacgcgggcgcggacggcgtttgtttgcctacatggtgctgctcggcgcgctggtgtcggcgctgtttgccaatgacggcgcggcgctgatcttgacacccattgtgatgtcgatgctgctggccctgcgcttctccccggcggcgaccctggcctttgtcatgggcgccggatttatcgccgataccgcgagcctgccgctggtagtgtcgaacctggtgaacatcgtctcggccgactacttcaagatcggtttcaacgaatacgccgccgtgatggcgccggtgaacttcgtcagcgtcgcggccaccctggcggtgctgctgtggttcttccgccgcgatattccacaaacctacgacccggccgacctggaagaccctgccagcgccatccacgaccgcgccaccttccgcgccggctggtgggtgctgggtatcctgttggtggggtgctttgccctggagccgctgggcattccgatcagtgctatttccgccgcctgcgccctgctgttgctggtgatcgccgccaaggggcacaagatttccacgcgcaaagtgctgaaggaagcaccgtggcagatcgtgatcttttccctgggcatgtacctggtggtctacggcctgcgcaacgccggcctcaccacttacctggcgacctggctcgatacgttcgccacctacggcgtgtggggcgcggccatgggcaccggtgtgctgacggcgttgctgtcgtcggcgatgaacaacttgccgaccgtgttgatcggtgcgctgtccatcgagtccagccatgccgtgggcgtggtcaaggacgcgatgatctacgccaacgtgatcggcagcgacctcggcccgaagatcacccctatcggcagcctggccaccttgctgtggctgcacatcctggcgcgcaagggcatcagcatcacctggggctactacttcaaggtcggcatcgtgctgaccctgccggtgttgttgatcaccctcgccgccctcgccctgcgcctgagtttctaacggagataccccgatgaaagtcctgttcatgtgtaccgccaacagctgccgcagcatcctgtccgaagccatattcaaccacctggcgccggaaggcttcgaagcgatcagctcgggcagctttcccaagggccaggtgctgccgcgcagtttgagcacgttgcaggcggcgggcatcagtaccgaggggttgtacagcaagggcaacgacgcctttgaaggcagcccgccggatgtggtgattaccgtgtgcgacaaggccgccggtgaagcctgcccggtgtatttcgggccggcggtgaaggcgcactgggggttggaagacccgtcggacgtccagggtgacgacgccagtgtgcaagcggcattcgacgccacgctgaagaccatcgccacacgttgccgggcgtttttcgtcctgcccttcgacgaactcagccctgccgacctcaaggcggaacttgcgcgtattgcgcagttgtaatcggaggccctatgaccaccctgcccaacctggacctgtccctggtcgactcaaaactcggcggcgcggaccagccgccgcgcatcctgctgctctacggctcgacccgcgaacgctcgttcagccgcctgctggtggaagaagccgcacgcctgttgcagcacttcggcgcacacacccgcatcttcaatcccagtggcctgccgttgcccgatgacgcgcccagcgatcaccccaaggtgcaggaactgctggaactgatgcagtggtccgaaggccaggtgtggtgctcgcccgagcggcatggctcgatgtcggcggtgttcaaggcgcaactggactgggtgcccttgaccctgggcgcggtgcgcccgactcaaggcaagaccctggcggtgatgcaagtgtccggcggctcccagtccttcaacaccgtcaaccaactgcgggtgctggggcgctggatgcgcatgttcaccatccccaaccagtcctcggtgcccaaggccttcatggagttcgatgaacaggaccgcatgaagccctcggcgctttatgatcgggtcgtcgatgtaatggaggaactggtgcgcttcaccctgctgctgcgcgaccgccccgacctggtggaccgttactcggagcgcaaggaaagcgccgatgaactggcgcgccgggtcaatcaacggtcgatttgatccccccggccagcgtatgctcgtgcctgtcccccgactgagtgaaatcgatgagcgccgtgcaacacgcctggctgggcaactatgaagtcagtagcacggcctgcaacgggctgacctttgcccgccatagccatgatgaatgtgtgatcggcgtgaacctggtaggcgaggaaaaagtctggctggatcgtcgcgagttccacgccggccccggtgccatcaccttgtacaatcccggccagattcaaggcggcggtgcggccgatggtgcgccctggcactttgtgagcttgtacgccacggcggaacaattggcggcggacctggggctggtgcacctggaatttgaccgtgctttatgtgttcagcccgagcttgccctgcgactggccgccgcgatcaagggagcgctaagcggtgacgcgctggttcgcgacgtgaatgaagacgccttggtgctgctgttgggtgaagtggtgaacatcagcggggtacgcctgcccggcagcgccaatcccggcaaacccctggtcagccgcgcccaggaattgctcgccgaacacctgcatcaacccctgaccctggaccacctgggcggcgaactggggctgtccaaattccacctgctgcgtgccttccagaaagaaaccgggctgacgccccgggagtgggccatgcagttgcgtacccgtcgcgccaaaggcctgttgcgcaagggcgtccccgctggcgaggcggcccacgacctgggcttcgccgaccagagtcacctgaaccggcatttccgggcggcctacggcatcacccctggccactaccaaagcaccgtaaaacgctgaacagcgcaatctggtccaagacaccgcgcctgcacatcctcacactgccccgcctcacttgaaggaaatgcaggcatgctgacgatctttttttatgcactgatattcggttttgtgttttgcctctcccccggcgccgtgctcgcggagaccctgcgccgtggcttgctgcatggctttacaccagccctgctggtgcagttcggctcactggtgggcgatgccgtgtgggcagtgatcggcctgaccgggatcgccctgctgatccagcatgacgcggtgcgtgtgccgttgacggtggtgtgtgcgttgtacctggcctggctgggcgtacgcagcctggtcgatgcctggcacctgccacaaccggacagcgcgcccgccagcacccggcaaaatgccctggcggtaggcgccgcaatttccctggccaacccgaagaacatcgtctactggggcgcactgggcagtgcgctgtcggggattgtcggcaccacgcccagccacgggcagacgctgatgttctttgccgggttcatgctcgcgtcgatcttgtcatgctttctgattgccgctctggtgaacctgttgcgtcagaacgcctcgcctatttggcagcgcatcagttatgccgcctgtggactggtgctgatctacctggcgctgctggcctggcaaggcctctgatcaggccggccagcggcggtgcaggtcgtcgatcacatacacgtgtcggtgcacaccggctgccgggtggaccaggtgcgggtggccggctggcaggtcagggtgctcatgcagcaccatcgcttgctcatgctccggtcgccacaggctggcgcacgcgatcaatgccagggtggccacaaaggccaggctggcaaacgtctgcgacatgccgaagttggcaccgagccagccggccagcgggtacgtcagcagccagcagatgtgcgacaacgcaaattgcgcggcaaacagcgccggccggtcctcggcatgggcggagcggcgcagcaagcgcccgcccggggtttgcgccagggaatagcccagccccagcacccaccacagcaccagcagttgccggtaatccgatagatacacgcctacactgagccccaggatcagcagcccaccgcccgacagcatggccacacggtcgctgaggcgcgccagcaacctcggcaacaccagcgctgccatcatcgaaccggcgccgaacgcggccagcgcaaacgccgtgaagcgttgcggcaaggcaaacccggcttgcaccagcaccacgctgttgacgatgaccatcgcactggcagccgccaccgccaggttcagtgccagcagaccgcgcaggcgcggcgttgcgaggaatatccgcaggccacgggtggtgcggtcatagataccgcgccgcagcttcacctgggcttgcggcaaaagcaccgacgacaccagcaaggccgaaaccaaaaaacccatcgaggtcccggcgaacaggctgtggaagctgatgacgctcaacagcatcgccgccaggatcgggctggccacactttccaggtcgtaggccagacgcgccagggacagtgccttggtgtactgcgcctcgtcggggaggatgtcggggatggtcgcctggaacgtcggcgtgaacgccgccgacgccgactgcagcacaaaaatcagtagatagacctgccacacctcggtgacgaagggcaacgccagcgcgaccagcgcgcgtgtcaggtccaggcccaccagcatcgccctgcgcggcaagcgctcggcaaaggcggccgccaccggcgcaaccccgatgtaggccagcatcttgatcgccaacgcggtccccaacacggtgccggcctgatcacctgccagctcgaacgccagcagccccagggcgacggtggtcaagccggtgccgatcagggccatcacctgggcgaagaacagccgacggtaggttttgttgccaagtacatcgaacatgggcgccccctggcgtgctgcctataggtatttggtcagttgcttgagctcagccagcgaagcctggccatccagcgtcacactgccttcgaggcaatggtcgatatggtcctggatcagcgtgcgcttggcctggcagaccgccttctccaccgcgtgcagttgctgggcgatatccacgcacgggcgctgcgcctcgatcatgctggtaatgctgcgcaaatgaccttcggcacgcttgaggcgtttgacgatggcttcatgggtttggtggacatgttcgctcattgagaggctccttagacgaagcctgatcgtatcccccccagggaggatgctggcaagcccgctcatctccgtcgtcaaaacaattagctcactgctcacaacgctgacttagtgcaagtaacgttacaaccgaagcagaactgaaacaggccttctatctgaacgaactctgaacttgtaatgaattaatacattaagcgttgacatcctgcatcgccctgagtagattgcccgtgcctgcaactggggccttttttaaacctcacaaaagaagccaatggacacagtatctagtcgctgtccgagcaccgccttggcgggcatcgggcgccaaacccagaacatgacaggactcgcctccccggtccggtaagctgcgctagagcttgatgctccaccgtaactgcctcgccggtcgcccgtccggtcccgaggtgtgttatgaccttgctaacccttgctttgcccgatgtacgcacactcgcggccgccctgcgcgccaagctgtgccgcgagcctgtaggcttttcgcctacccgctctgcctttgctgcaccctcccctcaaatgcgcccggctcacccgctggcgcattggcgtatctgccctgacagcggccaactggtccagcactgggatcacgccgaccctcaagacccacagagacccaaggtttccagcctggcccaggccagcttgatgctcggtctgtatgtgagcgctcgcgccgcctgacccggctggaaacagcaacttcctgattattgttctggagttctttatgaacacgtccagtagtagcccgctgcgcgttagttaattaacgcgctgttagcgggcgctgtagaagttatgtgaacaccttatttaaaccgatcgcgaagttagcgactcggcatgctttcgctcgcctgtcatcaggccggtaacgggtatgttttgtcgaaaaattggcgacaggagcacacaccatgagcgccgtaaaaaacgccccattgaacaaaaagagcagcagccacaccgacaccaaactgtcgatgcgtgccgcccgcgaagcccagaacggactgtcggccaccttggccaacgtccgcgccaccaaagacggcctcaccgagctggacgcccaggcgcgcctgcaacgcgaaggctacaacgaagtggcgcatgacaagccgcgtcacgccatcgtgcagttcctgcaggcactgaacaacccgttcatctatgtactgctgaccctggccggcatcagcttcttcactgactgctggctgccgatgcaggaaggcgaagacgccgacccgaccaaagtcatcatcatcatgaccatggtattgctcagcagcctgctgcgcttctggcaggaacaccgctcggccaaatccgccgaagccctcaaggccatggtccgcaccaccgccaccgtgctgcgccgtgagcaagtcggctcccaaccgaccctgcgcgaagtgccgatgcgcgagctggtggccggcgatatcgtgcagctgtcggccggcgacatgatcccggccgatatccgcctgatcgagtcccgtgacctgttcatcagccaggcggtgctgaccggcgaagccttgccggtcgaaaagtacgacaccctcggcgatgtcacgcagaaatccgccagttccatggccgccgaccagggcaacctgctggacctgcccaacatctgcttcatgggcaccaacgtggtcagcgggcgtgcgcaggctgtcgtcgtggccaccggggcacgcacctactttggctccctggccaaggcgattgtcggctcgcgggtgcaaaccgccttcgaccggggcgtgaacagcgtcagctggttgctgatccgcttcatgctggtgatggtgccgatcgtgttcctgctcaatggcttctccaagggtgactggggcgatgcgttcctgtttgccctggcggttgccgtaggcctcaccccggaaatgctgccgatgatcgtcagcgccaacctggccaagggcgccacggccatggccaagcgcaaagtggtggtcaagcgcctcaacgcgatccagaacttcggctcgatggacgtactgtgcaccgacaagaccggcaccctgacccaggacaagatcatcctcgaacaccacgtcaacgccttcggccaacgtgatgatgcggtgctgtccctggcctggctcaacagccatcaccagagcggcatgaaaaacctgatggaccaggccgtggtggagttctcggaacgtaatccgaagttccaggtgccgtttgcctacagcaaggtcgatgagttgccgttcgacttcgtccgccgtcgcctgtcgatcgtggtcaaggatgctgccgacgatcaactgctggtgtgcaaaggtgccgtggaagagatgctgagcatttccacccatgtgatggaagccggcgctgcggtgccactggatgatcgtcgccgcgaggagttgctggcgattgccaacgactacaacgaagacggtttccgcgtgctggtggtggcgacccgtcacattcctaaatccctggcgcgtcagcaatacaccacggccgatgagcgcaacctggtgatccagggcttcctgaccttcctcgatccaccgaaggaaaccgccggccctgcgattgccgcgctgcaacagattggcgtggctatcaaagtgctcaccggcgacaacgccgtggtcaccagcaagatctgccgccaggtcggcctcgatccaggccagccgctgctgggcaccgaaatcgaagcgatggacgacgcgacactgctgcgccgcgtggaagaacgcacggtatttgccaagctgacaccgctgcagaaatcccgggtgctcaaggcgctgcaagccaacggccacaccgtgggcttcctcggtgacgggatcaacgatgcaccggcgctgcgcgatgccgacgtggggatctcggtcgacaccgccaccgatatcgccaaggaatcagccgacatcatcctgctggaaaagagcctgatggtgctggaagaaggcgtgctcaagggtcgcgagaccttcggcaacatcatgaagtacctgaacatgactgccagctccaacttcggcaacgtgttctcggtgctggtggccagtgcgttcattccgttcctgccgatgctgtcgatccacctgctgctgcagaacctgatgtacgacatctcccagctggcgctgccgtgggacaagatggacaaggaatacctggccaagccgcgcaagtgggatgcgaagaacatcggccgcttcatgatctggatcgggccgacctcgtcgatcttcgacatcaccacgtttgcgctgatgtggtacgtgttcgccgccaacagcgtcgagatgcagaccctgttccagtccggctggtttatcgagggcctgctttcgcaaaccctggtggtgcacatgctgcgtacccgcaagatcccgttcttccagagtaccgccgcgtggccggtgttgatgatgacctgcgtggtgatcgtgctggggatctacgtgccgttctcgccgctgggcaccctggtgggcctgcaaccgctgccgatggcctacttcccatggctggtgggcaccttgctcagctactgctgcgtggcccaactgatgaagacgatctacatccgccgcttcaagcagtggtactgatctctcccgccgtttaaacggtggcggtcgcccggccgccaccgtgcactacaaggaaacaccctatgcgcgtcttgatctgtgcaggtcgtcattacgccgacaccaaaatgtcccgccaggtgctggacgcttaccaccgcctgcgcccggtgcaggtattgatccacggcggcaatcaattcctcggcagtgacgtcgaggaatgggcacgggaactgggcatcgatgtggtgcgctacccgcccaactggcaacgccacggcaaacaggcggaacgccagcgcaaccatttcatgctgaccgacagccgccccgatgtggtcatcgccctgcccggcggggacgacaccagcgagctggtgtgccaggccaaagccagcggcatttcggtactgaccgtagaaagctgaattcatgcgaggtgcatcatgcacaaaaaacacaccccagcccgtcaggacgggtttgccaaataccgtgcgcgtcactaccgcggtgcacgccacacgttactgctgctgccaccggccaaacgccgcgcgttgcagcgcaatttgattttcataggcctgaccctgggcatcctgttggcgattgccttgctgtcaaaagcccacgcggccggcggttcttatatggtcgacgacggtgcgatcaacgcgccaggcgaatgcaacgtcgacgcctggtacaccgccaaccgccacgacggcagtacccacacagaaacgctgtcaccggcctgcaccttcgccgcgctgccttcggtgcaatggggcgcggccctgtcgcgtgcaaccagcacagacaagggcgaaacccaggtgaacccgcagctaaaggcccaggtgtggtcgcgggaggatctgggcctggaactggccctgtccgccggcgcgcactttgccctggatcgtcatcacgggtttgatggcgcggacttcaatattccgttgacctggcaaccgctgacacccctgcggctgaacctgaatgccggctggtcccatgcctacaacgatggtgaccagaaacaccgcctgacctggggcaccggttttgaataccaggtggcgccgttgctgacgctgatcgccgaacgctacggccaggaaggcggcgaccaggcctggcaggccgggccccggttgcatttgggcgaattcgtcgacgtggacctggtggtcggccgcagcctgatcggtgatcgggcacagtggttgaccaccggcgccacgctgcgtttctaggccttggcttgttgttccaggtgcagttgcaattgcgggtcgatttgcaactgccctgccaggtcgtccaggtaattgcgttcggcgtcctgctgatcgtccaccagcatcacactggccaggtacacctcggccgccacggccgggtcgctggcaaactcggcgaaatccgcggcatccagcggcttggccacttcggcgtcgagccactcttgcagttgcgggtcgtcggtatgccggcccagctcattggagatcaactgctgctcttgctcatcgatgcgcccgtctgccttggccgccgcgatcaaggcacgcagtaccgcgtggctatgggcttcggcggcggagccgtcgagctggtccaccgtctggaaggcttgctgcggcgcgctggcctgctggcgttgccaggcttgataggcctggaatgcggccatgcccagggaggccagtgccgcgtagttcatcccgccggagcgcccttgggcaggacgagcgcccgtcgcaccgcccagcatgccgccaaggccacccaatagatcacccaggccgccaccggttgaagcattaccggtgctggtgcctttcaataaaccgcccaatagcccaccgaggccaccgcccgaagaagcactgccaccttgcccggcgcgcaagagttgttccagtaagtcgctggtgttcatggtgctaccctcccagggcgcagtgttggcgtttaacaaacatagcccggccttgccggaacaccatgaccgccgggcgggcgcgacttatcattgcgtcaccgcgccttcgagagaacagccacgtgaaccggattgaacacatcgcattgatggccaactacaaccagtggatgaaccgcaagctctacgacgcggccaacacgttgtcggacgcgcagttgtcgacggatcgccaggcgtttttcggctcgatcctcggcacgctgaaccatgtggcgctgggcgacaccgtgtggctcaagcgctttgccgggcatcccgccgggtacacagcgctggcgccgctggaggcgattgccgcaccgctcgacctgaggcagttggcatttgccgatatccgcgaactggccacccaccgcgcctggctggaccaactgatcatcgactgggcccacaccgtgcgcgagcccgacctggatcagcgcctgcactacagcaacatgcgcggcgtcgcagccgacaaaccgttcttcggcctgctggtgcacttcttcaatcaccagacccatcatcgcggccaggccaccaccctgctgagccaggtggggctggatgtgggcactacggatttgctggcgctgatcgaatgaactcggcgtacgcctgcagcaagcgcggaaattcctgaggttcgggcaattgcgcaaagctttcaacggcgggcgtggacacccagggcaatttttcgcgggtccaggtttccatgaaaggtacgtaatcgccggcgttatccagcaacgtcgcacgcacgttgacgaactcatcgatgccatggggacgggtgaacagccagctcatgcagtgcgggcaaaagtaatgccggtccacgccctgcaggccgccgatcaccgggcagccctgggtcaccgtaaaaccgctggcgggaatcaacgcgctcaaggagaacgcgctggaggacatcttctggcaaccggtgcagtgacaggccatggtgatcactggggcagcactcacgctgaaacgtacacgttcacaacggcagctaccctcttgcggcagggtgtcggcactcatcatcacttcctttcatggatggggtgggtggcaggttaacgtccgacctcgaccttgaacaggccatacacccaaccgaacgctgagctgcacctggggtcgtaaccttaggtgccggggttttactaccccgccctccccgcgtgcatcgtgggtctaccgatgcgcgtacccccaagaaggagacgcttacatggtcattcacttcaaggtcgccggccacctcgcctgtggtcaccacggcaacaacctgccttccagcaacgagctgaaccgggtcaaatgccgtacctgccgcaataccgaagcctacaaggaagcgcgccgcacccagcgcaatgccgcccgccgtgccaatcgcaaggccaagagccacaccgccgtcgactggcgcagtgcatggacacaacggttgacggacttgccagggttgcagcgtttgccacggggatttagtggtcagccgtttgtataagccgcacatgcaaaaaagccccggatgatccggggctttttttgttcttaaaaaagataagggcctgcgtcaggtttccccggcaagcccttgatatctatggtgcccgaacccggaatcgaaccgggacgcccttacgagcgggggattttaagtcccatgcgtctaccagtttcgccattcgggcggcagcgcgtgttgcagggttgggaatatatagatcccttcgcctcgatgcaaggtcgcaagacagctttatcgcacaactggacgggtgaaaaaagcttgttagatcagtgatctagattagcttttggaagccagtccaagagacctgttgctcggcaacccgccagctctggtactgtgacgcccccaacggaatggacacatcgcagaatggactcacgcaaggtatttacaatcattgccctggcagtgctcggcaactcagccgtggccgccgagaacaacaacccgtttcaggccgcgctgatgctcacgtcggtcgctccgtttgtgctgacctccggcgccctggcgttaacctccgctattcctgacctgttcaaatcctccaaaagcgatgcacttgcgtatatcggctcagggggagagatccgtggggcgcagtttgaacaggcatcgcgctactaccgttcaaactacactgcccccctaatgtctgacatgcagttggcccaggccattgccacgactctctgacccttcagcccaacaaggaagtcatcgctgatgcacaagtcccctacctggctacacacaaccctgtcgataccggtctacgcgactgcggtcgtgttttggatgttgaccgtctacctgatcgtcactgcgtcggtgaagatgctttcccgatttgtgacgcccgagcagattggcgaaggggtggccaacttgctcgtagccgttgccctggccgcattgggtagtggcctgtggaaactggccaggtatgtccggacgtcatccttcaaaaagccggcgaaggcgactttgacgtaactattctgtaacagacgcagcgtctggcgctggcttcttgagcgccagcgctggatcgggcacctcgacccagcccttcttcagatactcacctgccacgattttacgtatcaggaaacagtagatgatgggcaatactgcaatcggtatcgccgcccagggcgggcctgccaagaggcccagtccgagggcggccccccagatcagcaagtggcgccaaaggcccgcgaagagcaggtagagagggccgagaaacagtacggccaggacctgaaaggcgtcgacctcttcaacctggtcactgtccggatgtttgaaatagcgggtcattgcactgtccttgtggggtgagaagcccgaagaatctaacactggagaccttgtattcctactgaaccatcagcctttcctgacgagcctgcgggtcgctgcccattgatgttgaagccgactatgctaaggcgatgtgcctgatccgagacgtcaggctcgcccgcctctggttccccagcggctggtagcggaatacccgcagtgatcccccctatcggagacccgagatgaatcccaacgccaccgcccttgtcctgatcgaattccagaacgacttcaccaccccgggtggtgtgttccatgacgcggtcaaagacgtgatgcatcagtccgacatgctggccaacaccgccaccaccgtgcaacaagcgcgcacactgggcgtaaagatcattcacctgcccatccagttcgccgaaggctatccggagctggcattgcgcgactatgggattctcaaaggtgtagccgacggcagcgcgtttcgtaccggcagttggggggccgagatcagcgagtcgattacccgtgaacccggggatattctcgtggaaggcaagcgcgggctggatggttttgccaccacgggcctggacctggtgctgcgcaacaatggtgtccagaacctggtggtggccgggttcctgaccaattgctgcgtcgagggcacggtgcggtcaggttatgagaagggttacaacgtggtgaccttgagcgactgcaccgccaccttcaccgacgaacaacaaaaggccgtcgaaaacttcacgctgccgatgttttcgaaggtgttgcgccataccgagtttcttggggcgttgagcgcccagtaagaaaaaagggagcgactgatcactcagtcgctcccttttatttcatccgtcgagtggttttatccgttgagcgtcaaccccggataagcccgcaccggcaccttgtgccgctgcggttgctgccgggcaagctgcgcctggacctgcgcaaccgcatccagcacgcgttgcgcccactgctcgtcttccgggtcgacgactaccacgcgaaaaccatggtcgacgccttcaagctgcacgccctcggaatcatcgacatgcaagtcgatatcgaaggccggcgggaatttcgacggtgtgctcgtcagcccacgctcggtgagagcctggttgtgtcgcacgctgttgaccacgccatccacatggatgccatacagcagcaaccaacgacggatgtaggacggcgtgcggcccgacgaagtgtagacccacacgctgcagccctggcggcgcagctcgcgggtcagcttgcgggtgccgctgcgcagcggctcacccagccaacggtgcacacacgccggcaagcggctgtgttcggtcgcgctgtggtgcagctggcaggccagcgtgtcatcgatatcgaacgagatacggatgcgttgacgcttgaacacccgcttgattgtgtcgagcactgggtaccttcccatcattgatttccctgatacacaggcacaggtgtgtcgctcaggaaaaactccattggatcaggggccttatcttccaggaacgcggcatattttttcttgatcttgggcaattcgtacaaggccatgacgccatgcttggcggagttgcgtatgaccgaggacgggttgaaatagccctcggcgttgtccagcgtcaacacgaacggcgccaacccctcgcgcatcaacaggtagctgacgatcagcgagccactgcggtggttgccttcaatgaacaactgcggcttgctgaggacccgcacatacaccccggctgcgcgcttccacaccgactcgctgtggtgcttgcagtaccagttgtacaaatccttgatgccaccttcgacattgttgaaaaaatgcacttcggtggccgccaggtgctgggcgtattcacgcctgcgtaccgggtccgtgccgcacagcacggtggcgttgatctccagcatcaggttcagctgctgaaggtcgaacagatcgataccgcgcgccacatagtcgtcaatcagggcgtagccttcaagcacattctgcagcacttcgtccgtcagcgggtcgcgtggctcggtaaagtcccggctgagctgggcaaaacggctctggacctcacgcagggcgcgttcgatggcgagcaaatcaagacgacgtgttgcagtcattggcaatcctgaaaaacgatgaatagcgggtcagctgaacttgccgctgatgtagtccccggtcatttgttcgcgcgggttttcgaagatctgcgtggtcgcgcccatttccaccaggtaaccggtacgggtgccctgggagatgtccaccgagaaaaacgcggtggtatcggccacacggatcgcctgctgcatgttgtgggtgaccagtgcgatggtgtagtccttcttcaactcgaccatcagctcttccacccggcgcgtggcaatcgggtcgagtgccgagcagggttcgtccagcaacagcacttccggctcggtggcgatggcgcgggcgatgcacaggcgctgctgctggccgccagagagcgacaggccgctgaccttgagcttgtccttgacctcatcccacaacgcagcgccttgcagggcgtgcttgacgcggtcgccgaggtcgcccttgtagcggttcaggcgcaggccaaaggccacgttgtcgaaaatactcatcgagaacgggttcggctgctggaacaccatgccgatgtagcgacgtacgaccaccgggtcaacgcctttgccgtatacgtcctggccgaggaagtgcacatggccttcgaaacggaagcccttcaccaggtcgttcatgcggttgaggctacgcagcaccgtggacttgccgcagccggacgggccgatgaaaccggtgatcttgtttttctcgatcggcacatggctgtcacgcaccgccatgaaattgccgtagaaaatcttgtccagcttgcagtccatgaccacaggcgactgggtgataaacggagcggctacttgcgcagttgacatgttcaaaattcagatgctcccgttcttagtacttgggcttgccgaaaatacggctcacgatattcacgaccagcacgatcatcaccagcaccaacgaagccgcccaggcgagctcaagctggttgtcgaacggcatgccggagaagttgtagatcagcacggccagggacgccgtcggattcatcaccgccaggctgccgtcgtggtagatccagtagttgctgaacagcgcggtgaacaacagcggtgcggtttcgccggcggcgcgggccacggcgagcatgacgcccgtgaggatcgcgggcatgccggtgggcaagacgattttccagatcacctgcgagcgggtgcagcccatgccgtaggcggcgtccttcatgatcttgggcaccatcttcatcgactcttccgccgtcagcaccacgatcggcagcatcagcacggccaatgccacgccaccggccggggccgagtatgtgccggtggtcatcaccaccagggcgtaggcgaacacgcccgccaggatcgatggcaagccggtgagcatcttggcggcaaagcgcgaggcgttggccagcttgctgtccggccccagttctgcaaggaaaatcgccgccaggatgccgaccggcaccgcgatggcggcagcgataccgaccatcacgaaggtaccggccatggcgttgccgaagccgccgccagtctcgaaaccggtaggcggcagttcggtgaacacttccaggctcaggcgcgcaccgccacgggtgatcagcatgtagagcacggaaatcagcggcacgctggccagcagtgcgccgaaccacaccagggtggtcagcaccaggctgcgcagggcacggccctcgaaccggcgctgcaggctcggcatggccgtcatcggcgtagaaaggtcagtcattatttagtcccccgctgggcgtagaccatgatcatcgaaccgatgatgttcaccagcagcgtgatgaacatcagcaccagggcggcgtacatcaacacttcgatctcgttggggccggcttcggggaagttcagcgccaacagggccgccaaggtgttggccggtgcaaacagcgacagcgagatgttattggcgttacccaccagcatggccagggccatggtttcacccagggcacgaccgaggccgagcaccagggaaccgaagatgccggtcgcagcggacggcaccatcaccttgagaatcgcttcccagtgggtggtgcccatgccgtaggcggcttgcttggttttcatcggtacacccgtgagggcgtcctgggaaacggcagcgatggtcggcaggatcatgatcgccagtaccaatgcggccggtaacaggcccggcccgctgagggacgtgccaaaaaaaggaatccagcctagttcagtgttcagccacgcagtcagtgggcggatggccgggatcaccacgtagatgccccacaggccgtagaccacgctggggatggcggcgagcaattcgacgatggtgcgaaacaccgccgccagtttggctggcaggaaatcctgggtgagaaaaatcgccatgctgacgccgaagaaacctgcgatcagcaacgcgataagggcgctgtaaagcgtgccccaaatagctggcaaaatgccgtacttgccttggttaacgtcccagacactgccgaacagcacgtcgaaaccgtgcttttccatgccggggagtgccttgcgccctacttcgaagaccagcgcgaagaccagcgccagcaccaacaccacgccgatgcgtgcaagcgcacggaaggtacggtcaaccacgaaatccttggtagagggtggctggcacgcagaatccgggttgaccggtacgacaaagggtttgttcattggttgattccggaacaaggggggatcgctcccgacatggctgaccgcccatgccgggagtggcgtggcgagccttactggatgttggcggaagctttgcgaacttggtcgactaccgatttaggcagcgggatgtagcccatcgagtcggcgattttctggccttcggtcaagctgtactcgaccatttcacgcatggccttggccttggccgggttgccgttgtccttgcggaagatcatccaggtgtaggaggtgatcgggtaggacttggcgccatccggatccggcagccaggccaccaggctttccggcatcttcaccgcagccagggcttcggcaccgctttcggcgtttggtaccacgtacttgccggccttgttctgcaactgggcaaagtcaaccttggccagtttggcgaagccgtactcgatgtaaccgatggcgcccggggtctggcgcacggtggcggtcacgccgtcgttcttcggcgacttgatgaacttgtcgctggcaggccagttgacggtgttgccttcgcccaggtctttctggaactcagggttgatcgccgacaggtgcttggtgaataccgctgtggtgccgctggagtctgcgcgcaccaccacggtgatcggcagctctggcagtttcaggccagggttggcggcagcgatcttcggatcgttccacttggtgatcttgcccaggaagatgttggagtacacgtcgcgcggcaacttgagctctttagggttgcccggcaggttgaaggccagcacgatttcaccagcggtcatcggcagcagttgcacgccttcggccaccttggcgatgtcttcgtctttcatggccgagtcgctggcggcgaaatcgacggttttgttcaggaagtcctgtacacccgcaccgctacccttggactggtagtcaacggtgacgccctcggttttcttgctgaaatccttgaaccaggtgaggtagatcggcgcggggaagctcgcaccggaaccggtcagacggatgctctcggcagcaaacaccgaggtggcactgagagaaaccgcaacggcgagtgcagcagacttcatcagacgtttcattcaggaaaatccttgtgaattacgggctggggaactctgcaacaatcttgttacggttttatgaacgtggagtggcaaaacgcctggttgtccccctctccccccgcaatcaggcattttgacgtcattggttcgtaacaaattgagactaagactttgccatctcccaccacgcgagctccgtccatgtcctcgatcgaagacgccttgatgcaacgcatccaccgtgaactgctggatcacagtgacgaagagctggaactggaattatccgaagacgggcacgacctcaatgcgctgtttgacgaacatgtgggtgaaagcgccgaaaaaaccgcacgccgcatatacttcagcgagctgttccgcctgcaaggcgaactggtgaagttgcagagctgggtggtcaagaccggccacaaggtggtgatcctgttcgaagggcgggatgccgccggcaaaggcggtgtgatcaagcgcatcacgcagcgcctgaaccccagggtctgccgggtggccgccctgcccgcgccgaacgaccgcgaacagacccagtggtacttccagcgctacgtctcacacctgccagccgccggtgaaatcgtgctgttcgaccgcagttggtacaaccgcgccggcgtcgagcaggtcatggggttctgcaacgccgagcagtacgaagagttcttccgcagcgtgccggagttcgagcgcatgctcgcccgctccggcatccagctgatcaagtactggttttccatctccgaccaggaacagcacctgcgttttctcagccgcattcacgacccgctcaagcagtggaaactcagccccatggacctggaatcccgtcggcgctgggaagcctataccaaggccaaggaaatcatgcttgagcgcacccacatcgccgaagcgccatggtgggtggtgcaagccgatgacaagaagaaagcccgcctcaactgcatccaccatttgctcgggcagatgccgtatgaagaagtgcaattgccggtaatcgagttgccacagcgtgtgcggcaggaagattattcccgcagccccacgccgccggagttgatcgtgccgcagctctactgagtcagctgcaagctcgcccccgcaattacaggggcgagttgctcaccacccgcagcgccaggccctcataggcatccagcgtgatcgtaaactcgccttccgccgtcaagtcaccctcgacccgctcattgatgatgtccaccaccatgcccgcgccaatatccggcaaatgcagggtttcggtgatgggcgtggcaccgaagttcagcgcggtgatttgtatgcctttaccggccggcaattcatggaccatcaccagcagccccgggttttccacttccggcacctggatctggcggctggcggcgatgtcataggcacggcgtaccgcgaggattttttgcagctgcgaggcaaacgactcagggtcctgcaactggctgttgaggctgccatacaagcttttcgagcgcggcatctggccggcggacaattcggcatccgggttcaaatccaccaggtcataagcaccgcgatgaatccagcgcgtatcgccgtcctgcatcaagtgttcaacctcttcggccgccagcggcagcgcccccaccaggtcccagcccgacaaggcaaacacccccggctgcatggcgttgtacatcaccaacagcaaatggatctggcgtatctgctggatatccgcttgggtgatggcgtccaggtcgcgaatccccagcgccgccgtgatgatactgacggtggtgcaggacacgccgttggtgacgaacttgaggttgtacggtgcctgttcgccggccaggcgctcgtacatctgttcgcgaatgtgctcgcgcaggatgttcccgggaaaggtctggccctggtacaggaaagtgtcatgggcatgcagggtccagaagtgcaccagttccagggtcagttcatcgtggttctgcaacgcgtggatcagcgagccagggtcgatgccctggcggtgcatttcgcgcagcatcaggcgcaggaactcggcgtcgcccatcagcaacgcgtgctggtaagcgggacgggtgatgaagtcataggacaggtcggcgccgccatgggacatggacgcgatgtcgtccacggtgaggttcaactcctggaaactgaagccgccggccttgcgaatcgccccgccgagcaactggttgccggtgatcgacagcggatggctctcggaccaggccgtgccgtccagcttgcgctccacgccgaggaaaccattggcgtccaggcgcaggatcttcgcccccatcacgtcgatggcgtgcaatgcgtcgccgatgatcatctgctgcgcggcgaaagtcgggtccagccagttcagcgatggctggccttccttgaagtaatgcaggtagacccagcgacgcggcttgccatccacgcccagcaccacgtccgtggcgctccagtcggtttccttgacgccgggctcgaagaagatcacccgctgcagctggccgacgatgtagtgcttgtcacgcaatgcatcgacctgcgccgggctgaggttctgcgcatcgcggccctcggcgacgtcgggcagcaacgaccagtcttcttcgcggatttccaccatgtggtacaggccggggtagtcctcgtacgccatctcggccaggcggaagtccgcgcccttgccggtgtgggacgggatcacatcgtcgatgatcaccgcattgtgcgccgcggccatgcgcgtcaacgcctgcaactgcgcctcggtgcccagttgcgggtcgatctcgaaactgatgcggtcgaaattgccgtcgatggtcggcgtgtgctgtgtaccgctcaaaccgccggattttttcagcggaccgttatggatgccttggatgccgatcttcgacagcgcatgccacaacgcctcatccccaagcgcctccaacaccgtgccgccttcgcgggtcacgattgaggccgggtaggcggtaaaccataccgacgacaacgccgaagcatcccggggccgggtctgcgcgtaaggctgctgccacaaccggccctggcccgagtagagcttggcgcgctggcgggccgcgtgcagcatcgattgttccaccagccagttcacatggttgttttcagccgcagtcataagcgtggtacctgtcgtcgtggatgagtccaacgcggcagtatcaagtctcgataacaccgggtgtagtcatatgaggcgtcgaggggctattcgttgcattgaatgtggggttgcgtcgttcgaaatacgcagcgtgctccggactcgcatggagatggacgaactccctcatcatctcggaatgcggcagaaaacttgaagcgacaagcatgccccagcgttcgctcgggatcgtgttcaacatttcagtggatttcagtgtggtcgtcgaaaacaacctcaacaacacttcatcagaaatcacagcctgttttagtaaatacagttgtagtttgtgatggtcatcgggatggagttgccagagagaatcccccaagacctccaggttcaggaggatgaagttgttcagggcagctcttttctccctgttgtgacgctccgccttggtgtgaaaacgcggcgtgaggatatcggtattcgctcgaaaatatgtccagacggcttcagctttgtcactgaccctatcggcagccatcagccgcacccacagactcatggaggcgctttcaagtgtcgcgaattcgcagtctgtgcgatccagcaaggatctgacccactcaggctcggcataaatagcagtaagcaacgcggccaaagactctgctgactcatccaacatgccagtctggctgagtaattgctggaccagtctctgtgggtcacgctccaacaacgtttcgatcccctccagtcgcaacgctgtcagccgacggtaagttacaggcgactcctgttccgagcccaactcaaatgacgcgcatatcaaacgaagcattttcagttcaggcgcgataaacccccagctcaccaactgcttgaggtcatccgccgcgacggcatcactgaggttataaaattgcacaggatgttgacgcaaccagccccatgtggcctcgcccttggcaagcagcgacacgacatcgctgacatcctgcaacccttcaaggctttctagcacgccgtggtcgcagtcttccagtgcgctgatttgctcaggagccaagctgctgactattgcgcagaccaacgcctgctttggaccgctgtccacaaaacgttttgacgagaacagcccctcaagagactcagggtcggtgtcgtagatagcttgaatcaaggcgggggcgttttcacttgtcaggatggaatccaccacactggcaaagcgtggcatgaattgcgctgccgtgctgaggatcgcgttcagcttccacccatgggtaccgtggtccgcagccgtgtattgactgcacaggtaatcgaccaaccctgcaatcaagccgcgcccctcccccaacgctttttggtcaagtttgccgagcaccctctccgggttattgacgactgtcatcacctctggtgactcaccaccgcgcagggccaggatcaggttcttgtcatcctgcgtgagcgacccttcgtagaagaacccttggtaatcgtagtagtcggtgtcgaaatatccttcacgcatcagataaatcaacgcttttatagacccgagcttctgagtcagtacttcgccatactcggcccttgcagcctctctgaaggacatgcgctggatgcggatgctctgattgttcagcgcttcgattttcctggtaaaaacctcccgctcagccgtcagtcccgaagcgcgttcccggtatgacgtcaagtgcaagacgcgctcactctcaaccgtttttacctgagtgttaaagttgatgtgatggcgactttccatggacagcttccggtttttcttgatcatttcatcaaaaaactcgtcttgtacaaactccgtcaacgtcattgtcacttcgttgtcgtacgtgagatcagtggtgtccacgggattgatcagcttgacgacctgataccaaacgcaaaccctcagctcttccagactcgcaaggtgttcgcgctccacaatcgccagttgctctcgcacgtcagatatctgcgcatcaatctcttttgcctgggcaatacgccaatcaccaaactcattgaagacagaaaaaatcggcccgcgccgcttgagcagctcggcacaggcctccgggtacaagttgcgcacggccaccatcgccaacagtttgttaacgtccagtttcacgccgcgaccacccagcaggctggagaacaggtccagctcgttgatgatgttcttgatcaaccgcatatcgtcgatgtagtaacacaccgtctcgatcagcacagggtcgaaacggcgaattgaatcaaagcgttttgccttgagcaggtccatcatcttttcctgcgagttctccgagttgactacgggtaccacgggaatgatcaggtcaaagaactttgcctggtcgtcagcgaagaacagttcatcgcgtattgcatagatgaagtgcacgggacgcttgatttgtggtgattgcttgatggtgaagttgatttcgcgcaggcgaaaaaacacgtcctgaatgccaaatcgatcaaggtcctcgatcacgacgacgttgatatcactgcgttcgaaacagtagatgatctcgtcgacatgcttgtgcagcactgaaccatggtgaagggattccagtttcccgcctttgagggtcagcccgtcgatgctgaaaagcgacaagtacttcaaggcgcaatacagcaagtacacacccgcagccaggacgaacgccagggtccaactatccggcacccacaacagttgagtgataagccaatcgggaacgtatttgggcataggatcgacgaaaggcaggtacagccgcacaccacaggcaaccaacagggcgaagaacaccgtatgaaagaggttgcgggcattcgaggcgtgtacgatgcgtttcaaccgcgtttttggcaccttacgcgcaggtacggcgtagagcagctgctggacgatggtctcctcaatgcgtggcatcagatcatcgtttttggccggcggttcagccggcgatactgcacgctctgccgggttgtcttgactgaacgtggcaagggagacgaatacaggctcgtattcggggtgacgatcaaaaaaagtcctgatcacgctgctcttgcctgcgccgtacccacccgttatcgcaatgttgcgaacctgctcgttttcgagcgcgtgcagcaactcactgacatagcgatcagcctgcgccccctcgagcaatacaggcgtcaagtctacgaaaccttcttcactcaagggtatcgccttgtgcgctctccataccttgaggaaggcgctgatgctccgtttaaacctgatcactattccttgagtcactgaatcatcctttaacaatctgaggtgcggcatgaaagcgcccaccatgatagctcaatgccatcctcgcagtcctgcaatccatctcaacgtactcgctgggttccacacacagcggtgttgccatcgccagcaagccggctcctacagaaacgcttcattcagcgagtgtcccgatactgcctcggcgtaaaccccgtcgaggccttgaactgccgagtgaacgcactgtggtcggtgtacccgcactgcagtgccacctcggtgatcggcaggtcgctgtgcaataaccggtgggcgtgttccagccgcactttctggatcatctgccggggcgtgaggtggaacacgcgcttgcagtaacgctccagctgcgccacggaaatcccggcgatgcgggtcaactcacccagggtgacgcggcggttgaagtgcgcacggatgtgcgcgtccacggcggccaggcgttgataggcggggtggctctcgctggcggtttgcaaatcgaccgagatgccggccaggccgatgatcacacccgtgtggttgtacagcggccacttgtgggtcaggcaccagccgggttcacgggtgccatacaggtgcagttcgagctggtcttccagcacaaagccctgttccagcacgcggcggtcctgctcggtgtaacccggccccagttgtgcggggaacacttgtgcgctggtcttgcccagcagcggttgcagctgcttgaggccgcagcgttgtaccaacgtacggttggcgaggaggtagcgggcctgggtgtccttgatgaaaatcgccgcattggggatcacatccagcatcggcaacagctgcaccacaccggccaggaactgctcgatgctgtggggtcgattggcctcatccccttggcacagggccgcaaacgcagtctgcaacatgactttcgatcccctgttgaatgcctcgacgcacgcagattgcccgatggtttgagcgctgtcgagccacgaaaactgtgccgatttcgtcaccgatctcggcaaaaaacatcaatcgcgccgccgcccgtgagttcactgtatggccactgcatgcctatccaataactcacaagaaggcgacgctatgtcaggtcaaggcaagttcaagaaacaactttcattgatggacctcacctttatcgggctgggggccatcttcggttcgggctggttgttcgcagccagtcatgtgtcggccattgccggcccggcgggcattatctcctggctcattggcgggttcgcggtgttgctgctggggattgtgtactgcgagttgggcgccgcattgccccgcgccggtggcgtggtgcgctacccggtttattcccacggcccgttgctgggctacctgatgggctttatcacgctgatcgcattttccagtctggtcgccatcgaagtggtcgcctcgcgccaatacgccgcggcctggtttcccgagctgaccaaggtcggttccagcgacccgaccaccctcggctggctggtgcagttcgccctgctctgtctgtttttcgtgctcaattaccgcagcgtgaagaccttcgccatagccaataacctggtcagcgtgttcaagttcatcgtgccgttgctggtgatcggtgtgctgttcaccttcttcaagccggcgaactttcaggtgcagggttttgcgccgttcggcctgtccgggatcgagatggcggtttctgcgggcggggtgatttttgcctacctggggctcacaccgatcatctcggtggccagtgaagtgaagaacccgcagcgcacgattccgatcgcgttgatcctctcggtgttgctgtcgaccgcaatctacgtgctgctgcaaaccgccttcctgggcggcgtgcccacggaaatgctcgccaacggctgggccgggatcagcaaggaactggcgctgccctatcgggatatcgccctggcgctgggtgtgggctggctggcctacctggtggtggcggatgcggtgatctcccccagcggctgcggcaacatctacatgaacgccacgccgcgggtggtgtatggctgggcgcagaccggcacgttcttcaagatcttcacgcgtatcgacgagaagtccggcatcccgcgcccggcgctgtggctgacgtttggcttgtcggtattctggaccctgccgttcccctcctgggaagcgctgatcaatgtggtgtccgccgcgttgatcctcagctatgccgtggccccggtgaccgtcgccgcactgcgccgcaatgcaccgcagatggcgcggccgttccgggtcaagggcatggccgtgctcggtccgctgtcgttcatcatcgctgcgctgatcgtgtactggtccggctggggcacggtgtcctggctgctcggcctgcaaatcctgatgttcgtggtgtacctgttgtgcgcgcgctgggtgccgaccgcgcacctcgacctcaagcagcaagtgcgttcctcagcctggctgatcggcttctacgcagtgaccatcctgctgtccaagctcggcagttttggcggcatcggtgtgctcagccatccgctcgacacccttgtggtcgcggcatgcgcactcggcatttactactggggcgccgccactggcgtgccagctcacttggttcggctggaacacgaagccgatgaaagcgaagcggttgacgcgcctcacgccccgctgacgcctgcgacttactgattcaggagcgttttatgaagcgattgcacgtgatcgactcccataccggcggcgaaccgacgcgcctggtgatgagcggttttccggcgctggaaggcgtcacgattgccgatcagctgcaccacctgcgcaccgagcatgaccaatggcgccgcgcctgcatcctggagccgcgaggcaatgatgtgctggtcggcgcgctgtactgcgcgccggtcacgccgggcgccatctgcggggtgatcttcttcaacaacgccggctacctcggcatgtgtggacacggcaccattggcctggtcgcgtccctgcatcacctgggtcgcatcgcgcccggcgtgcacacaatcgacacacccgtcgggccggtcgcggctaccttgcacgaagacggcgcggtgaccttgcgcaacgttcctgcctaccgctatcgcgagcagatcgcagtgctcgtgccgggtcacggcatagtccatggcgatatcgcctggggcggcaactggtttttcctggtgtcggaacatggccagcgcctgcagatggacaacgtcgacgccctcaccgactacacctgggcaatgctcaaggccctggaagaccaaagcatccacggcgccgacggtgcactgatcgaccacatcgaactgttcgccgacgacgaccacgccgacagccgcaacttcgtcatgtgccccggcaaagcctacgaccgctcgccctgcggcaccggcaccagcgccaagctggcctgcctggccgccgatggaaaacttgcgcccggcgaaacctgggtgcaagccagcatcaccggcagccaattcgcaggccgctacgaatgggacggcgaacgtgtacgccccttcatcaccggccgtgcccacatgaccgccgacagcaccttgctgatcgacccgcaagacccttttgcctggggcatctgagccctccccctactggaaactggagtgaacaccatgagcgacaacatcttcaccggctgcatccctgccctgatgaccccgtgcacgcctgagcgcaagccggacttcgacgccctggtcgccaaaggccgcgagctgatcgatatcggcatgagcgccgtggtgtactgcggctccatgggcgactggccgttgctcaccgaggccgaacgccaggaaggcgtggcgcggctggtggcggccggtgtaccgaccatcgtcggcaccggcgcggtgaacagccgcgaagccgtggcccatgcggcccacgccgccaaggtcggtgcccatggcttgatggtgattccgcgtgtgctgtcccggggtgcctccgccaccgcacaaaaggcgcacttctcggcgatcctcaaggccgcgcccaacctgccggcggtgatctacaacagcccgtactacggcttcgccacccgcgccgagctgttcttcgaattgcgccgcgaacacccgaacctgatcggcttcaaggagttcggtggcggtgccgacctgcgctacgccgccgaacacatcacctcccaggacgacagcgtgaccctcatggtcggggtcgacacccaggtggtgcacggtttcgtcaactgcaatgccaccggtgcaatcaccggcatcggcaacgcactgcctcgggaagtgctgcaactggtggccctgagtaaaaaagccgccaagggcgatgccaaggcccgtcgccaggcgcgtgagctggaagctgcgctggcggtgctgtcgtccttcgacgagggctgcgacctggtgctgtattacaagcacttgatggtgctgaacggtgacaagggctacgccctgcacttcaacgaaaccgatgccctcagcgatgcccagcgtcgttacgcagagaaccagtacgccctgttccgccagtggtacgccagctggtcggcggaacagaacgtcgcctgacccttcgcgcgccgctgcgacgctcgcagcggccaaccctcttttttccaggaaatccccatgactctgacgggcaagatgctgatcggtcagcacgccactgccggcactcgcgaagcgatccgggcgatcaatcccgccaacgataccgccttggaaccggcctacctcggcggcaacggcgagcatgtcgcccaggcctgcgccttggcgtgggcggcattggatgcctatcgcgaaacctctctggaggcgcgcgccactttccttgagaccatcgccgcgcacatcgaggccctgggcgatgaactgatcgaccgcgccgttgccgaaaccggcctgccccgcccacgtatccagggcgaacgggcgcgcacctgcgggcaactgcgcaccttcgcccgcaccgtgcgtgccggagaatggctggatgtgcgggttgataacgcacaaccgcaacgccagcccctgccccgtccagacctgcggcaacgccatatcgcgctcggcccggtcgcggtgtttggcgccagcaactttccattggccttttccgtggccggtggggataccgcctctgcgctggctgccggttgcccggtcatcgtcaaagcccacggcgcgcaccctggcaccagtgaactggtgggtcgtgcggtggcgcaggcggtcaaggcgtgcggtctgccggagggcgttttttcgctgctgtacggttcgggccgcgaggtgggcattgcgctggtcaccgacccgcgcatcaaggccgtcgggtttaccggctcgcgcagcggtggcctggcgttgatccaggcagcgcaggcacggccagagccgattccggtctacgcggagatgagttcgatcaacccggtgtacctgtttccggcagcgttggcggccaggggtgaagcattggcccagggttttgtggcgtcgttgacccagggcgccgggcagttctgtaccaacccggggttggtcattgcggcgcaaggcccagccctggatcgcttcatcagcctggccagtggcttgctgccgacctgtggggcacagaccatgctcacgccgggcattgccagtgcctacgctgcaggcgtaggcgaactcgctgaacatgcaaaggtggccgcaaagggtttgccggtgacaggccccaaccagggccaggcccatctgttcgtgacccaggcgcaggcattcctggccaatgagcatctgcaagcggaagcgttcggcgccgcgtcactgctggtcgtctgcaccgacaatgaagaagtgcgccaagtatccgagcatctcgaaggccagctcaccgccacgttacacatggatgagaacgaccttcccgaggccaaggcactgctgccggtgctggagcgcaaggccggtcgcttgctggtcaatggctggccgactggcgttgaggtgtgtgatgccatggtccacggtggcccctccccggccacctcggatgcgcgcagcacatcggtgggtacggcggcgatccagcgtttcctgcggccagtgtgttatcaggatttccccgatgcattgctgccggccgcgctccagcacggcaacccgttgctgctgcgacgcctgcttgacggccagagagaggcataagcgatgtccgatcccgatatcgtcgtagtcggcgccggcatcattggcgtcgcctgcgccctgcaactggcgcgtcagggccggcacgtggtggtggtcgatcaacaggaacccggcatgggcgcgtcctatggcaacgccgggcacctggctaccgaacaggtgttcccgattgccgacgtgtcgatcctcaagcgcttgcccggcatgctgctggaccccatgggcccgctgcgcctggattggaaatacctgccgcgcgccctgccctggtttgcgcggctgctgttgaacctgcgtccggcgcgctaccagcgtaccgtcgcgggtattcgtgcgcttaacgaaggcagcctggacgcctggcagcgcctgctgcacagcatcggacgtgcgcacctgctgcgtgaagacgggtcattgttggtgtacgaacgagcggactcacgcgacgcactccaggccttgcagcagcgcatgcaagcgcagcaggtgcccgtggcgttctggaccggcgatgccattcgccaggctgcgccgcagttgagcgagcgcatccagggcgggctgtttttcccgagcaccgggcacttcctcgacccgtaccaggtggtgtgcgaactggtccaggctgccaaggccagtggcgtagagttcttcaagcgccaggtactggatggacgggttgaggaacacggcgtctccctcaccaccgatcagggcaccctgagcgcacgccaggtgttgattgcgtgcggcgcccactcggccaaattgaccgctgccctgaccggcaaaaaggtcccgctggacacggaacgcggctatcacctgatgctgccccacgagccgcatcgcctgccgtttgccgtcacctccctggaacgcaaattcatcatgacccccatgaccgacggcttgcgcctggctggcacggtggaattcgccggcctgaagcgcccggcaaatatgcagcgtgcctggcagttgcatcggttgagcaaggggttgtttcgggatgacctcaacgcagagggtgccacaccgtggatggggttccggccgtcactgccggactcgttgccggtgattgaccgggtgtgtgacgggaaggtgctgcttgcgttcgggcaccagcatctggggttgacgcaggcggcggtgacggcggagatgattggggaattggcgagcaagggtcaaacaccgttactcacgccttatcgcctcgaccgcttctgaccaacgcgtttttttgcggtgagttgcctgttgtggcgagcgggcttgccccgcgttgggctgcgaagcagccctgaaaacaaacaccgcgctctgtctgacaggcggcggtgttttctattgggggacttaatcatggggtttgagcagccgtgctgtagagtgcgtcagccatttcctcaatttcatcacgcatacaaagcttgttcagccaacccgtcgggatgccttgcacgccgtaatatgcacccgccaactgaccaacgatggcggcagtagtgtcagcgtcgtcacccaggttcgcggcagccaacaccgcgtcggcgaagctgtcagtatgttttacgcaccacagcgccgcctccaatgacgccacggcgtaaccggaacccgttatctgcgcacgggtcttgttgcaatactccccctgggcaatcgctacgactttgggcgcagaaagacccgcgcaagagatattcaacaggcgctccttcgttgctccactcaacgcgttaccgatggctctcgccaacaccacgcaacactcgattgcctcttgggctccgtgagtcgtacgggagctttctcgggaaaagtcatcaacgctttgcaggtttggaaagtaaaacagtaccagcggcgcgaggcgcatcatcgaaccgttgcctgcggaaaaaggctctgtcgaacctgcaaacggatcaccttgcgactcaaacgccgtgagcgccgtgcgcacggtcatgcctatatcaaagcaatcaccggtagagctcaggtaaccccacttccaccagttcaggtatcgccccatctggtcagctgcatcaaaaccacctttacgcagcaagctttccgcaaggcacaacgccatcgaggtgtcgtccgtccattggcccgctttcaggttgaacggtcctcctccaaccatgtcggtgaccggtgggaatgtgccgcgaggcatgaattcaacagtggtgcccacggcgtcgccacaggccaagcccaacaggctgccacggtaacgatccaaaagcgtgagagacatttgtcatcctttaaagaaagtgagtcagtcagcactttacttgaccaagcgcttctccttcgaggggcgatagccgaagtacgagctgtagcacttgctgaaatggctcggcgacacaaacccgcaggctaccagcacctccacctgtgacagctcggtgtgctgcaacagccgccgcgcctcggtcacccgcagctccatgtagtaccgctgcggggtggtgcccagttgctccttgaacaagcgctccaactggcgccgcgagcggccggcgtagaccgccagttggtccagctccaaaggttcttcgaggttggcgtccatcagtttcaccacttcacgcaatggcgcactgacgctgacgttttcggtgggtttgatgcggcggtagcgggactcttcgaaggccaggatgtcttcgatgccttcgacaagtgccttgtcatgcagggctttgatccagtccaacgccatgtggaaggcgccggacgggcttgaagcggtgaggcggtcgcggtcgatcacgtagggttcgctggtaacgtgagtggccttggagacttctgccagcgccggacggtgttcagggtgaatggcgcagcgatagccctgcaacaggccggcgcgcccaaggaaccaggcgccgttccacaagcccgcaaggctgatgccctgttcggcggcggtgtgcagcaggtggatgaaggcttcgccggccttgagttcggtacggaatccgccgcagatcaccaacaggtccaggtcgtgcaataccacggcatccaggcgcgcatcggggcgaatcacaaggccaaggtcgctgatgacttcgccctcgtcacagccgaaggtgcgcgaggcgaacagttcggggcgcagcaggttggcggtgacgaaggtgtcgagggtctgggtgaatgccggcagagagaaatgttcgagtaacaggaagccgacgcgggtgaccgacgccggctgttgggtttcgttgaggtagcgcaggttcttgcctttcatgccaccgctgaattgacgtctttccatcgagggttggcccactcttattgttgaggtctttgaaaaaccggccattacgggcgaacactgtagctgtggcgagcgggcttgtcccgcgttgggttgcgaagcgaccctggaagggggaatgcggtgaatcaggcactctgtggctgctggttttggggctgcttcgcagcccaacgcggggcaagcccgctcgccacagcgtatttatcgcctgttgtgcctagagacctggctgccgcaggcgctgatcctgagaaagccacacgcactgcaagcccccggctgaacagcggcaagcgcatctgatacggttttttctttgctatctgcgtctgtatcgaaacgccgtctgggcggacaatgaccccatccccactcccttcccttcggaggccttatgaccaagatggcacttttcctgttcggctttttggtgctgaccatcggcatcggcctgttggccacgatctcgccggtctgacgctcagccggcaaacagcatcgggtacagcgacagcaccagcagcccggccatcgtccagttgaacaggcgcaaccagcgcggctcacgcagcacattgcgcaagccgctgccacaccccacccatacacacactgggcaggttgaccacggcgaacaccagtgcaatcagcagcacattggtgacgtagccttcggccggcgtgtaagtggtgatagcgcccagcgccatgatccaggccttggggttcacccattggaatgccgccgcgccgaggaaagtcatgggcttgccctgctcgtccgcgctgtcggacatgccgcccgctgtcgcgatcttccacgccaggtacagcaagtacgcagcccccacgtagcgcaacaccgtgtatgcccacgggaacaccttgaacacttcgcccagccccagccccaccgaaatcaccagcagcatgaacccgatgctgatccccaatgcatggggcatcgagcggcgaaagccgaagttcaccccggaggcgaggagcatggtgttattgggcccgggcgtgatcgaggacacgaaggcgaacagcacaaaggcggacaacaagctggtagacatgaacatgacgcggcatccaaacggcgggggtgtgcctgcgacagtagagggttatcggctaccctgccccgtacagccagggccggattgaggcatacacttttttgccatggttttcacaaacctttcacagacaagcgcctagggtggcttcagctcctaatgaacatccctttagcccgcgctccccacgcgggcttttctttgccctgggtttatcgcaggcaaaaaaacaggcaagccgtgcttcacggcttgcctgcctggcctatcggttaacgcggtccgccgccagggccagggccgccgccctgaccatgcccgccaccgccgtgaccaccgccaccacccggtggcatgaacatcaagcagccggacaaggtcgataacagcgcgaccaccacagccgccttggttagataactcaacttcatgactacactctcttacttgacgagattgacttctcgctgggtatgacagtgcaaaccgaagtgcgtcacggctatcgtgtaacccgttggtagggtttgtagggccaacggtacaaactgctgttttagttctgcggccgctgcttggtcgaatccagctcggcttttttacccgtggaaatctcagtgatctgcgcagacttggcaatcgcgaaatcgaaggtgtcctgcatttttgcaatcgcgtcggtcgacgtgccgttcagcccaccgttggcggcccaatcgaagttccacacaccggagaggttatcggcacccggcacatcgtgggtttcgatggcggtgaagacgtcaggatgacgctccatgtacttggccgcatcggagacttcggccggcaccttgcccgaggcgttgttggccagttgggtcagttcctgcttggtaatggctgacttgccggtctggcgcatgtagtcggcgatcactttgctggacttggcgatgttcaacttgtcatcgaacaccgacggtgacgctttaggcgtgtttgccccgctgccggcgggcgttacggtggtagacatcggcgctgctcccctgatggtacgaatgaaatcgtcgtgctgacgatagccaggagcagacgttagcatgggcaatgggccattaatctgtgcttcacaacaattcacaaggccagggtctgcggcttctgtgaaagcctgcgaatccattaccatgagccggtattcatgctgattgattgccagccccctacccggaccccagtcatgagagacctaccacccaccgccaccctgcgtgccttcgaagtggcgacccggcacgcgacgttcacatcggcttcagaagagctgcatgtgacccagagcgcggtcagccaccaactcaagcacctcgaagacctgtggggcctgcagttgttccagcgcggcaaggcgttgcggctgactccggccggggccgcactggcgcccattgtgcgcgagtttttcatgaaccttgaggccacgctggctgacctcagggaacaaaaaggccgggttcgcctgaaggtcagcaccacgtattcgttcgccttgaaatggctgctgcccaggttgcccagcctgtcgcagcaacatccgcaaatcctgatcacgctggagaccagcgacaaggccatcaaattctccagcgcagacgcggatgtggccatccgcctgggcaacggcaattaccccggcctgcactcggagttcatgctccgcgagcagatcttcccggtggccagccccgacctgctcaagcgtttcggcgctccccacgagcccgccgagctgctgcgttacccgttgctgacgcgagacggcgcagacctagtgcccaagtgggaagcctggttcgagcatatcggcgtcagcattgcccccctcaaggaaagcgtcaggttcgctgacaccaacatgaccatcgaggcagcgctgctgggccaaggtattgcgctggcgcgaagcggccacgttgaagcggaaatcaacgacggccgcctggtcaggctgtttgagctgccgttcgcgtcaccggtcggctactactttgtgtgccccaaagggatcgaaacccagccgcatatcatcagctttcgtaactggttgttagccgagtcgatgcaggcacagcagaattatcagtgatgcatgaagaatcactcatgaccgaatgaaaagacttcgctgttaaacacgcacttgtggtgtttaccatggcgcatgcctttacccatcgttctactcatcctcttcgccgccctcttgcatgcaagctggaacgcgttgttgcgtgtcggcgccgacaggctgtggtcaatgaccatgatgtgcgtagcagtcgccatcgccagcttcgtaatagccttgtttctcgcccctcccgcgccagccagctggccctacgccgtgctgtcgggcgtgttgcacgtgggctataacctgttcctggtgcgaagctacaaggtgggcgacctggggcagacttacccgattgcccgcggctcctcgcccattctgatcacgctgtgcgcattggtgtttgccggggaaacggtcagcacaaacgcgctgatcggcattgtgctggtatcgggcggcattatttcactggccttcagacagcgcaggctggcggtgcccagcctgccctacgccctgggcacaggttttttcattgcggcctacagcgtcacggacggtattggcgcgaggctgtccggcgcaccgctggcctacaccgtatggatgtgtgcgctctggggcgtattgatgccactggtgtacatcggcctgcgcgatacacgcagcctcttcgcaccacgccccggcgtcatcacggccttgatcggggggcttgtgtccctcctggcctacggcatcgtcatttacgccatgtcccacgcgccgatgggcgccgtttcggccctgcgcgaaaccagcgtgctgtttgcggcattgatcggttattgcttcctgggcgagtcgctgactgcccgcaaagtgttggcgtgcctggtcattgcgatcggcacgatgctgataggttgatctttcacccctcacaggaggttcaagcaatggatacggtctcttcaaccccactgattctgatcaccggcggcagccgcggtgtcggcgcagcaaccgcacggcttgcggcggcgcaaggctacgatgtcgccatcagctacgtcagcaacgaggcggccgcgctcggcgtggtcgcggatgtgcaagcgttggggcgccgcgccctggccatccgcgccgacagtgcagaccctgaacaggtcgcgcagttgttcgctgccattgaccagacgtttggccgtctcgacgtgctggtcaataacgccgcgatcattgccctgcaatcgcgctttgaagacctcgacttcgcccgcatgcagcgcgtcttcgcgatcaacgccatcggcccgatgctgtgcgcgcagcaagcggtgaaacgcatgtcgctacgccacaacggcacgggtggaagcgtgatcaacgtgtcctcggcctccgcccggctgggcagcccgaacgagtatgtcgattacgctgcctccaagggcgccctggagacattcaccatcggcttgtccaaagaggtcgcccgtgaaggcatacgcgtcaactgcgtacggcctgggcatatctacaccgacatgcacgccagcggcggcgagccaggtcgcgtggatcgggtcaaggacagcattcccatgggccgcggtggcgagcccgaagaggtggcgcgcgctatcctgtggctggccggtaaggaagcgtcgttcatcaccgggaccttcctggatgtgacaggcggcaagtaagcggcaaccaccgattatcgggaggccagttggtcccggcgccgggccagcccttccagggtgaaccgcgcctgcatcagcaccacctcccgcaccagttccatctccttctggttcacttcgctccacttcaaggcttccagcagcttgggcttctggatgcggaaggccaggccctgggtaaacagcgccatggaatggatcaccgtgcgctcatcctccagcgccaggccggccacgcgcgcgatcagttcgcggatgacccgcgcaatacgcgccttgaaccgctcctcgaaggccatcgtcgcgctttgcgggcacaacccagcctggtggcgatccatgaacgcacgccatgccgtggtttgcgggctgtcctggatggttgaaaccacggtaccgagaatgcccagcgaggcgtcgatcagcgcgctgtcgccgcaatcggcatcggccaacacgctttccgctgcctccaccggcggcgacatcttgcgccacagcagcgtgatcaagtgctcgacgcacgccaggtacacgccttccttgccatcgaagtagtactggatcgcaggtgcgttgacgcccgcggccgtggcgatatcgcgggtcgacgcgccattgtagccccgtgcgccaaacacctcgacggcggcctcgatgatgcgtgcgcgggtttcttcgccgcgctggtaaccaccctcggcggcaggtttgtgtcgtgccatgtgcagctcccttcgaataccggaccaaaatataccagttgacaaaaattcgcgaaaaaacgaatttattccacccgttataaatctggagtgacctcgatgtcggctgcacctccctcccctcaggtcatgcctgaagaaactgtcaacggtcaacgcggcaaggcccggcgcatcctgctcagcgtggccggcgttgccttgttggcgggcgtgtcgtggggcgcctggtggtggatcaccgggcggtttatcgagaccaccgacgacgcctacctgcaagccgacagcatcagcgtggcgccaaagatcaacggctacgtggccgacgtgctggtgagcgacaaccagaacgtcaagcgtggcgacgtgctggtgcgcctggatgcgcgcaagtaccaggccgtgagcgatgaagcctcggcgaccatcgccgcacgcaatgccgacttcgccaaggcccaggccgacctggtgcaacaggactcgaccatcgccgaagcccgcgcccaattgcagggcgccgaggccgatgcccggcatgcgcagaccgaagtcgcccgctacgcgccgctggcccgctcgggcgccgaaccggaagagcgcctggcccaactgaacaaccaactggcacaggcccgcagcaccgtggcggccaaacaggcggcgctgcggtccagccagactcgctacggcacgttgcaggcccagctcaagcaggcccaggcgcaactgggcgtagccagggccagcgaggcgcaaagccaactggacgtcgacgacgcggtcatccgcagcccgctggacggccgtgtggctgaccgtggcgtacgcgtggggcagtacgtgcaacctggtacgcgtttgctgaccgtggtgccgatcagcgcgatctacctcaccgccaactacaaggaaacccagatcggtggcatgcgccccggccagaccgtcaccgtgcatgtcgacgccctacccggccgcgacctgcaaggccacatcgacagcctggcgcccggcaccggcgcgcagttcgccctgctgccgccgtcgaatgccaccggtaacttcaccaagatcgtgcaacgggtaccggtgcgcattgccctggacataccggatgacctgcgtgccgcattgatgccaggcctgtcggccaccgtggaagtcgacacccgcacccacgccgcagacgccaaccatggctgaggcgagcatggccggggtggctgccgagaaaccgcgcaacgcctcgctgaccgactggatcgccgtcgccgccggcgcgctgggtgccctgctggcgaccctggatgtgtcgatcaccaactcggcgttgccgcagatccagggccagatcggcgccaccggtaccgaaggcacctggattgccaccggctacctgatgtcggaaattgtcatgatccccctcgcggcctggctgacccgagtcttcggcctgcgccgcttcctgatcggcaccgcactcaccttcacgctgttctcgatgttctgcggcctgtccaccagccttggcgcgatgatcgccgggcgcattggccagggcttcgccggcggtgcgatgattccgaccgcgcagaccatcgtgcgcacgcgcctgccgccccaccaactggccatcggcaccacgatgttcggcatgaccgtgatcctcggtcccttgctcggcccggtgatcggcggctggctgacggagaacatcaactggcgctggtgcttctttctcaacctgcccatcagcatcgcgctgatcaccttgctgatcaccggcctgcccagcgaacgcatgaacctgcagcgctttatcagcgccgactggctgggcattctcggactggcgatgggcttgagctcgctgaccgtggtgctggaagaaggccagcgcgaacactggttcgactcgctgctgatcgtgtggctgagcattgccacggtcaccgggtttttcctgattgccgtggggcaattgcgctccagtacaccgatcctgcgcctgccgttggtgctcaacaaaagctttggcagcgtgttgctgatcggtacggcggtgggcgcagggctgtatggcacggcctatctggtgccgcaatttctcgggattttgtccggctataacgcgcagcagtccggcgcgatcatgctgctgtcggggattccggcgtttttgctgatgccgatcctgccgcggatgctcggccgctacgacctgcgctggatggtcggcgcaggcctgctgctgtactgggccagttgttttgtggacaccctgttgaccgccgacagcgtcggccatgattttgtctggtcgcagttgctacgtggcttcgggcagatcctggtgatgatgcccctcagccaactgtccatgcgttcggtcgagaccaaggacgccggcgatgcggccgggctctacaacatgtcacgcaacctcggcggcaccatcggcctggcgctgctcggcgtgttgatggaccggcgcagccacttccatgacgaccggctgcgcgaagggatcctggccaacagccaattgacccaggatcacatggccagcaacaccgccagctacctggcacagaccggcgacgcctccaccgcctcgttgcaagccatggcccaactggccaatgacatcgcccgccaagcctcggtgatggcctacaacgactcgttctacgtattgggactcgcaatgctggcgtgcctgcccctgatcttcatccttaaaaagcgcacggtacagccatgattgctcgctcgtttcctctgctcctgaccgttggcctgctatcggcctgcaccgtgggcccggactactcgggcgcccccgatgccgcgccgaaaaccctggccgccgggcacctgccccacgccgaccacaaagcgcccagcgcaccggccgtggcgcagtggtggcgaacgttgaatgacccgcaactcaatgaactggtcgacctggcgctgaacaacagccccgatatcgccaccgcccaggcccgcctgaaacagtcgcgcgccagcctcagcggtgcacgggccgacgccctgcccaaggtcaccggcgacgccgcgatgctcaaactgcgctcgcccgacacctccgcactgggtggcggcggtggcggtcgcgggccattgacgctctacctggccggcttcgatgccagttgggaggccgacctgttcggcggcacgcgccgtgcggtcgaggccgcgcaagccgaagccgacgctgcccaggcgcaactggctgacgcccaggtgcaactcgccgccgaagtggtgcaggcctacaccgacctgcgcgaccaacaggcacgcctggccctggtcgacgccagtgtcgacatcgaaaaccaggccctcgacctgacccagcaacgtcgcagccgtggtgtggcctcacagctgcaactggaacaagtcctcacccaggcagaaaacacccaggcccaacgcctgccgttgcaagccgccatcgttgaatccctggaccaactcggcctgctttgcggccaggaacccggtgaactggacggccgtctcgccaccgccaaagccctgcccgccatccccggcgtggtgcccgtggcagaccccgccgccctgctcaaggcccgccccgacatccgtgtcgccgaacgcaaactggcctccagcaacgcacagatcggcgagaaaaccgccgactggtttcccaagcttagcctgatgggcgacctgtcgttctccgccggcgaccccggccacctcgcccgcaaagacaacggcacctggctgatcctgccgcgcttgacctggaacgccctggacttcggccgcgtggccgccagtgtcaaaggcgccgaagccggtcgcgacgaagcgctcgcacagtacaaaagtgtcgtactgagcgcgctgcgcgacgccgatgtggccctggcgcggtacggccatcaacgccagaacgtcgtgctgttgcgcagtgtggaatcctcggcagtgcgtgcggcagacctgacccgccaacgctaccgtgccggcaccgccagcaccctggactggctggatgcggagcgcacccgctaccaggctcaggagagccggatttccggcgacgcggagttactcaaggattttgcttcgttgcacaaggcattggggctgggctggaccttatgacacactgcctcgccaagcgccgcctgacacgaggacagcatgctccgtattcatccagcaacccacgccgaccttgaagccctgcgcgacgtcggctgcaccacctaccgagaacacttcgcgcacatctggtcgcctgccggcttgcaggccttcctcgaccgcgacttctcccctgcctcgttgaaccaatcactcgaatcatccgacagccaaacgtggctgctcgcgtcggacgaaagcgagcggcccgtaggccttgccaagatcaactggtcagcccctgccccggtcacgggtgaagtgggcgcagaactgcgcaagatctactttctcaaatcggcggctgggcgtgggtatgggaaacgactggtgcaatacatctgtgaacaggccgtggaacgtggagacagcttgctgtggctgacggtactcacgtccaatccggatgcgcggcggttttatcaggcgtttggcttccaggtgatggggcaaattccattcaagactgacttggcagagattgggatggatgtcatggggtttgacctgaaacggttggggcaataaatggaagaattgatacgagggctcgacgggcccaggacggcccagcaggagttgttctacgacctggaagatgcggcggcagtgattggctggtcggtggttgagttgaccgctttggccgccagcggtcggacgccggatgaggtggcggcgctgatgaaaatctgcgcgttgctggcggcgcagcaggagaagatccgcgcgtatgcgggtgaggttaaggatcagcggattgtcagggctgacgtccggtaaatacgcatgttcgcgggttcaaaaagggatttacggatgccgttttcattggaagaaagaaccgcgttactcgcactcaaaggcgtgggaccaactgttattgctcgattggagcagatggggattacgtcgatggcggtgcttggcaaagcggatgccagtgacatcctgacgcaagaatcggcagcgttacagtcgacctgttggaagaatagtccgcaggcgcggaaggcgattacggcggccatggagcttgctaaaaagggcctatagaagttccttttgcaagtgtcccttcacactaactagcgcgcatcactaactacgcagggcagtgattattgaaatccttgacgcaataaaagttttcacctcagcaacatcttcaaactcagtcaccgcgagactcaacgacaagcgagttatttccagagcactacgttcgctttcgcccatccgcttagaaagttctccaaggtcttccatagactttttattttcaggcgtatcttttatatctttcaaaggaccaagcatagaaagtgcagtattgattcgttcacgataggcgttagcggcgctatgctgataattactttgttgatccaacatttgcagaagcccacttttataatcggcgactctagagcttttcaaagcgctatcggacaactcggtttgtcgttgctgctctataaatgccaggcgttgctgatccagtaaactactatactcttcacgctgagcatccatcatttcccgctgcaagctgatagttttcagaatagcaaccaacgtaacaacggaaaccatcgggccaaacacgccaccgaagaaagagccaaacgctgaccaattgttgggctcattagataggccatacctaaatacccacaaataagacgtcacagataagagtaatgcgataactaagatgctgattccataccgcaacacagcgtcgatacgcacaattcggcgtgcatttaactcatccaatgagacattcgacttttcaatcatcaaaggtcagctccctattttagaaacttcagaaatcacgttttcaaaggctcgtaagcccgagcaaaaaatgttattggcatatcttataattgttgcaaccgacggcgtattctaccccgacgcaagcctgttttcctcaactgctgctaactcagcattttctacacccaataaaaaccccgtagacgctaatctacggggttttcaagagtggaggccgaggccggaatcgaaccggcgtaggcggatttgcaatccacacaaatcatcatatttatcaaaaatatacgactctatcaattccgcacctccgagatttagggtggtcagagcccaaggaaatcgggggcacgatttcgattgcggaatggatttcctacgcttcgtcggcttcggtcgcaccggatgccatttcatactactgtgcatagatacagtatttagattaaccaaaccatgcacctcgatgaagaaacctgcgaatggctcggactgcccacgattatttaagctcaaccggacttaagggtctggcctgcacccattggcacgagggctagaaacggccctagaatggttggccgcgcctggccacagcgcgcgcttcaagactcccgagtggctcaaagtcaacgcgagtattggtaacgtgcgaaactaagccaccccatttgtccaacaaccgggctacactgcataaactttgataccacccccatcatcacactccctcacgcataggttaccaatgagcgtaaaagcatttgccactcagcttatgaattcaattaaagatatcaaaaacaatagtgaatcggtacagtgcgacagcttaattgcataccttgaaaaagtaatagctgatccaaacagcgaaccgacacccagccaaattgaatattataagtaccaacttcaattaatggttgagggagagaaaggcagtcacgcttcctatcttgaggagttccgcgcagtgattcagtcaggacaaaacgccatgaaaaccgcgcttttgatgaacggcggagcatcgattgccctacttgccttcattggaaaactcaccgagaagcagcagtatcaaatccctcacttcgcggaagctcttgcaatttttgttctaggcgttttcttcataggtgcagcttcaggtacgacttacttaagtcaatggttttatgcagagcccgaaaaatggaaaatacgcattggaagtgccttcaacactatatccatattgctcggcctaacctctttggggttttttgtttggggaatgtgcaaagcttattctgcgttcctagcattcacttaattacctactacttgcgttgactcctctcaaatatgcttggcaggcccgaagcgcgatcaatccttggtcgccggcgtcggtgatggcgacaattctttgagcgtgcgccggatccctcagggtctgaccccactttcttcaacagccattgctagggccaattgtttcgctgccaaagtagacataaccacctcaaacgtgacagacaatgaaaaatacacaatatttttttgtttttttaacgttattttacgcttgaagaaatacaaaaaattttgtaacctccaagaatgacagccccccctgcaccaagtcgcctcgctttagttttcaaaaagcgccgcgaagaattgaatatgactcaagaggatgccgcgcgccgggtgacagaacgccttgcacctcaaaaaaaataacgcaacaaacatatgcatcgtatgaaaagggtaaatcacagtcatcgaagcactccaccatcatcgcagacgtactggacctcccaattgctgtagtactagaagcaaacttaccgaacgggttcaagccgattgaatcagcgtctagatccaatgcatctctaattgcgccacacctcttggtgtgggacgagaaacctccactttacgacgaagtcgaggttccctttttcaaggaaatagaactgccaagtgattccggacggagcgaaatacaagagtgcggttcagtaaagctacgaatcagccaggctactctctcgagcatgaatatcagcgcagaaaagataatctgtgcgcaagtatctggagcgagcatggagccagtcttacctaacggtagtaccgtaggtattgataagagccgaagaactttgaaagatggcgacatgtttgcactaagtcataataatcaactccgcgtgcgaatcttatatcgcttaccgctcggaggcctgcggatgcgtagctttaacagagatgaatatcccgacgaagaatactcagcagaaagagttatatcagaggacatagtaattacaggtagagtattttggtattccgttctaaggtgatattttcatcaagcaccccgctgcagcactaggaattcgcatgctttattcgtaaaaaaagaccgatctaaataacatccctccaactctttgacagatttaattatggatcatgtaaaggattacctcgcgaaatacccgctatacgaatcactcagccaacggctgaaaatcttactgaaagacattgcggatgcggacaatatagacctgcatgcgatcgaagcaagagcaaaaacaccagatagctttgcatccaaaattactagacccggaaaagattattccgaccccctgtcagaaatcactgacctttgcggcattagagcaattctctattatcaagaaaatgttgaccaactcgctgacgccataaaaaaacactttaacgttagcacaacagactcagtggataaaagaagcgagttaaaccaagatcagttcggctatatctcactgcatctaatttgcgagataaataacgcccgcgcaatgcttcccgagtggaaaatatacgaagggctaaaatttgaaatccagataagaactgtacttcagcatgcctgggcatctatctctcaccagttacattacaaatcaaacgcggatgacaaggataacttcactagacagctctcgagaattgccgggcttcttgagctgtcagatgaacaattctcggaactcaaaaagaaaagagccactattaaaaccagcgtcaaacaaagtattgccaaaaaagatttagacctatcaatcaacagcgtctcgattgaacagtttctttcttcatctaaagtcttacgcgagattggggtcgcggttagaaaagcaaaatttaaacttactgaaagacagctagatcccgctcatatgttttcattctgccaaggcttacagattacaaccttacaggagctgaactcactactggaaaaattcgctcctagagcaattgagtttttcaatgagttcgcagaactaagcgacccgacatcgacattaggtggttatgggcattggggagctgtcgcaatagtaagcatccttcgcaacgaaaaagatttgacattcatcctggatgaggaaatctggagtgcggattacctcgaaaaggttaaatctacagccgacaagatatccttataacagccaacattatgagtcagtccggggtttcggccccgatggctcatacatagccgaaccaagccaacctcagatctacgatattttattgtatgcagtcgcaattttttgcattaacaaaatataccgtttaccacttaacaaatttacacgtatcgtctttatcgttatctctcaccgaagattacgagccatgcaaacgacacagcacagcaaaacccgccgctcggtctaccttcaacccgcggccgcaaccagccccgccgccgtagaacgcatccagcacagcaccggccttctgcccatcgtcaatcttgggcgcgcgaccattgcccccgcccccgcagcggttgcccgcgatgaccagggcccatgtggcgcgcccgctcaaggctgtgatgcctgaatagaagtacgtcgaacatcagatcgcgctgctgtcgcacatgttcacgatcgcacgctagtggggcctgacaaacaactccaccccttgcttcggtgtgcgccgcaacaaagagaccccacgggattattacgccgcgatatcgtgtggaatgaggtgtacgatgcagccgtacaggaactcaaagacgctatggacctggcttatctgaccggtcaacgacctgccgacgtactcaaagtggccaccactgatttgaacgccggattcttaacggtcaagcaaggaaagacagcgaagaaactgcgcctacgcctagaggatgacagtgtgctgtctgccctgagtgcctttatcaatgacctacaggcgcgtcgagcgcacaacggcattaaaacatcgacgctgatcaccaacaagtccggacttcgcatgagccagcagaagctacgcaatcgctgggacgaagcacgcgaaaaagcagccatcaaagccggcgccgacggcgactctgcgctggcagtactgatccgccaattccagttcaaggacattcggccgaaagctgcaaacgagatagaactgacgcacgccagccgcttgcttggccatacaacagaggagatgacaaaaaaggtctatcgaagagtgggagaaatagtaaaacccactaaatgagaggctctaggtcctcaacatactgctcaacgttccttctagacaagatcaaaaacttgtgaacatcgctgatagaaccttcgaagtgaaattccacccagtcgtactctttcattacatcaattgcactatttatcttctcacgcaattcatgagcaggcatcgaattagataaagatacagggagagcactaatcaacgccccatctatagttccgctcagattaatatcgctactatctcgaatcgtaatcagaccaccaccaatattaatggtattagacggagaattttttctgacctgtggtttcagacggttatgtttattgaaatttgtgtgagagcaaagatcagaaacccagctatctccacaattgtgaggctgaatagattcaaccaccgcgagcaggtctggtctttgttgcgccaagcccggaagattttttgagaggctttttacgaaactctcctcatcttttccataaggaaaatatggtgtgtttttcttttttgtataactctcccaaatatcctgtgctgtatattcaagcacgctccgcaagtgctccatcgtagacttaactaatggtttcaacacctctaactgaagatcatccgatcgagcgaaatcatatttcctctcaattgctaaaatattcgcactgcactcttctaaaagtgcttgtatgtctgcgcgccttttcatcagtcttttccttcattttatccgagagggtctgtaacgcgaatgtatcacttgaaccgataaacgaacaacgcagcacctgtcctgcaccgctgggggacaaacggaatttttggcaaaactccaggcaggttgcggaaggggtgagaaaagttgcggaacggatactaaatcgcaggcaataaaaaaccccgtagatcattgatctacggggccttaagagtggaggccgaggtcggaatcgaaccggcgtaggcggatttgcaatccgctgcataaccattttgctactcggcctcaaacgatcaatgtcctgactgctgacactcaccgcataaaaacttgagtgggctgtataaccctgcctctactctaactcattgaatacattgaagtttttaatgcttcgttgcgttcgatgggcgccattatgtacgtatttgcctaggcgtgcaaccccttgatttcaaaaatatttcgtattggcatcaaggggttgcgggcctgccctactccttgatgcgcagctgttggtactgcgggtcggccttgatctgggcgtcggtgaagggcagcgggcgcagttgtttttgggagaaggcttgggtctggtccttggcgtgtggggaagccgggttggtcgactcggagaacgcgagaatgccttgggcatggggcccctggtcgtcgaaggtgacgatttgcaggtagctggtgccgctgaccacttcgcgcttgccgtcggcgcgcggcacggtttgcatggcgttgtagatgccgagttcctgtgggccgccgtggatcggggtttgcccggagacttggatgtcgccccaggtgctgttggcggtcaggcccaattttgcgacgtcggcggtggaggccagcatggcttcgcgcagggctttggcgacgtcggcgcggtcgatcgccaggccacgtggcgtggtgaggggctgggccgggtcgaaggccacgcgccaggcgtcggggatttgctgcaggtgctgcaccaggttgatgaagtgcaccaggccgagaccgctgtcgaggttggcgcgctggtcccaggttttcaggctggtgcacaggggttgcaaggcagtggcgtcggtgccgaggtgtttggcgcagaactggagcaggtcaggcatgacttggccggccaggtacacctggttgtccatcaccatgtcgtgcaggtcgctgacgctgatcggtttagccagcgattgcagacgttgcaaggcgaaacgcgcacgcgggccgaggccgatgtggtcctggctgatcaccggggagaacccgctgagtggcgcctgggggttagccagccatgccgagtcgttggagtgctgcacgtagtctgtgcgttgcagttgcggcagttgctcggccgggaagatgccggcctgggcagcgcgcgggtcaacgtcccaggcgcaggcgctgtgggcgccgtcgagcatgatcatctgcaggccggcgcgtggatcgctgcattgtgccagcttggccgcgctgacattgggcaccaccgacaggttcatgtacaggctctggccctggtcatcggcggccagggtgttgacccacgggatgccttgcagggtgtgcaccgaggttttcaattggtcgaggctgccggcacggttcatcgcgtaccactgttgcagcacacggtcgttgcctaggttggcgtcgcgcaggctgaaggcgtagtggctgtcccaatcgagcttgcccggccactgcactaccgggccgaattgcgagctatagaccgtgtgcgattggtccttgaggctgccgtcggcttgtttgacctgcaccgtcaccgtggttttatccagggcgaccgatttgccgtcgagcaggtagcgcgtcgagtccttggggtcgagggtcaggcggtacagggtgaagtgcttggacgtgtccaccgtgtgggtccaggccacatgctggttaaaaccgatattgatcaccggcaggcccggcagcgcagcgcccatcacatccagctggccggggatggtcaggtgcatctcgtaaaaccgcatgccgcccacccaggggaagtgcgggttggccagcaacatgccgcgcccgttgaacgagcggtcacggcctactgccacggcgttactgccgcgatcaaaagcgaagcgctgttggttcgcggcagccatttcaaaagccttggcagtgctcgcaacgttggccgttgcttgaggcggcatcgcacccaccagggcttcggcgaattggccgacaccaccttcgaccaatagcctgcgggtcagcttgacaaggtcttcagccaccagcggccgtacccacgccgcctgacactgtgcaggcgcgccctgctctttcagataacggttgtagccggccacataaccttcaatacgctgctggatctgcgggctctgcgccctccagaacgcagcgaccgcgtccggcgtattgagccagccaaagaacaggtcactggccaggttgttgcgctcctccagggtcgcctgttcggggccaaagaagcgggcgcgctgaccatttacggtgaccacttcattggccagcaggcacaggttgtcctgggcgtaggcgtagccaatgccgaagcccaggccccgctcatcgttggcgcggatatgcggcacgccgtaactggtgcgccggatctccgccgatgcttgcgtcacctgctcccgcgcagcggcagccaggctcacgcccagcaacaccccggccacacacaccctggacaacccattggaaataatcacgcagactccaccgtcagatttaaccgcctcacaaggggcaataagcccaccgtaagaacgcaaaccaccaggaataatttagcgcgcagggtcgtttatttaaggcgatgcgcaggtgacaaaaccgatactgacgaaatttctacatccgacacttcatgattttgctcgctcgttcgtcttatcaactaagagcactcattttttcctgatcaggctctgataaggagtttttgcatgtacaacccgcaagtgcccacggatggacattcacaaatggccgaggccagtttcggcagcggcccgcaagcgttcggcaaagcgcccgaacagcacggcaaccagcgcatccgccatctgctcaagtgttttggcttgcgtaccagcctgatccggctgaaggtcatcgacgccctgctcaccgctgccgacaaccaacgcaccctcggcgtgcgcggcgtgcacagccatttgctggagctgggcattccgttgtcgtttctcagcgtgcgcgaagtgctcaagcgcctgtgcagcgagggcgtgatcaccctcaatgcggacaaaagctacagcctccatgaagaggctgccaaggtactcgaaggccgcgcctgatcgcctttagagcttgaccttgcggcgcatgatgccgttgatcaccaccacgaccactgcgacggcaatggcgatggtctggaatgtcttctcactgatgacgccggtgttctgcaagtaggacaggccaaacatcgtcgccaatacggtcagggcaatcagaatcgaatatttcaaacgctgcttttgggtcatgacgggttcctgaacctgaaaaatgtagccactgtgaatcgccggacctgccttacgcacgatggcgagcaggtccgacaggcgctcatgttacaggcgcgggaatactttggctcggtcaatcagccagcatgcacccagcgctggtgcagccaccgcgcaaacgcatcgagcgcaaaccccagcaaaccgatcagcaccaccatcgccatcagctccgaataagccagccgatcacgggtatcgaggatgtaatacccgagccccgcactgacccccagcatctcgcacggcaccagcacgatccacaaaatgccgatggccaagcgcacgcctgtcagcacatgccctaccacgccgggaatgatcacccggcgcaaggtctcccagcgggtcgcactcaaactggcactcaattgcaaccagcgtgggtcgagctgacgcacaccggcagcggtattgagcatgatcggccacacagcggcaaaggccagcaggaaataaatcggctggtcgcccacgcccatcagcatcaccacgataggcatccacgacagcggcgagatcatgcgcagaaactggaacgccggcgtggtcgctgcctccagcttgcgcgagctacccactagcagccccaacggcacgcccaccagcaaggccaggaacagtccgacgaagatgcgcttgaggctcagggcgacatgcagatacagctccccgcgcccgagcaattcccacaggctggcggcggtggcggacagggaaaagcgtgccgacaagccgtccgccgcgccaaacactttcacccccaaccaccagagcaacagcaaccccgccaagccactcaacccgagcaaccagcccgggatttcacgcgtgttcaaacgccgatctcctcatgccgctcaaagccatcaggcaaaccaaaggtcttcataccgcccacggactcgatggcgttgcgcacgaagcggtcgtccaccaggtccttggcgacaaatgccgggtccaggtcggcgaggaatttcttgtcgccctcgatcaacgtgtccttcaggcgacgcaccagctcctcggtgtagctggggaatgggtagggttggaagtcgatgcggtgctcatcccaattggcgtgctggatcgcgccgtccgccaggtaggccgcacggtcggcggcggccggtgccagcactttgctcaacaccggctcggcgtgtggggtgtagcggttcggaccgtccttggacagcagcttcactgcctcttcgcggttgtcgcgggtccagacctgagccttgacgatggcattcaccaccttctgcgaccactccgggcggttggtcaggtcgttctcgtgcatgaacaccacgcagcacgcatggttgcgccacacgtcgccggtgaagcgctgcacgcgaccgaccttgaggttttccgccagggcgttgaacggctcggcgacgatgtagccatcgatgcgctggctggccagggccggtggcatgtccgacggtggcaacacgatcaggttgacctcattggccgcaatcgcactgcccgccgcccgcgccaccggcgtgaggccgttgtcacggaacagctgctgcaccaccacgttatggatcgaataccagaacggaatcgccaccgacttgccgcccagttgcttcacgtcagtgatgcccggcgccacggtcaagcccgagccgcccacatggttccacgccaccactttggccggcaccttgctgccatagcgtgcccatacggtcatcggtgacaacaagtgaatcacgttgacctggcccgagatgaacgcctcgatcacctgcgcccaactgcgcagcagcaccgggcgctcggccttgatgccttcggcttcgaacaggccattgttatgcgccaccagcaacggcgtggcgtcggtgatcggcaggtaaccgatgcgtacgggggcgtccggctcgctggcggcgcgggcctgcagactgctcagcagcggcaaggctccggcggcactgagcacggcggagagtttgagaaagtcgcgacgcgagtgggtcaggtcatccaggcacatgggcaggctccagcaggtcaagtgagttgggttgggggcggctcgcctgccgtagggttttaaggatatcgatgcgcagcgcgccgatggcttccacctgttcttcgcgcggttgcggcaggtcgatcagccactcgcccaacgtccgcgccgggcggttgcccagtagcaggatgcggtccgacaacagcagcgcctcgtcaatgtcatgggtaatcagcacggccgccgagccttgctcgcggttgactttgagcagcaggtgctgcatgtcggcgcgggtcacctcgtcgagggcgccgaagggctcgtccagcaacagcacctggggctggcgcgccaggcaacgggccagtgccgtacgctgggccatgccgccggagagctgcgccgggaagtgctggcgcgcatgctccaggccgacggcggcgatggcgtggtcgacacgctggcggcgttgctcaacgctcaagtggggttgacgagcgaagtccaagccgaaggcgacgttcttttccaggctcagccagggcaacaggctggggtcctggaaggccaccgccacgcgcggatgaggcccatccacgggttctccgagcacccgcacactgccgccctgcggcgcctgcaaaccggcgagcacccgcaacaggctggacttgcccaccccgctggggccaaggatcgacaccacttcaccgggctgcagttgcaggtcaaagccctgcaacaccggcccgccggcataccccaggcaaatcccccgggcgttcaatacggcgttcgtcataggttggcctggcgctgcaactcggtgcgcaactgcaccaggctcggggtcacgatgggcacaaacgcggactcacgccagcgccgcgcaaaaccactgccgtgggcggtgaggtaggccttgccgccgctggcctgcaactccagttgcacggcgctggcagccgtttcggccagggcgatgcgcagcttgaacaacggcaccggttcggccgcaaagcgtccggccaacaggccgttcttcagctcggtgaccaggtgatccagcgtcacgcgtagcgtttccagttcttcgcgcaacaccgtacgggtcgcgcccagatggttggccacttccgccagggaacgccgggccaggccgatggacatgccgcactgcaaccccaggaacgccgggcgcaccgccggcaaaaacttgcgtgcatcttcatgcagcaaccagtcgcgactcaactccacgccttcgagccccagggccgcggtattgctggactgcaaacccaatagttccaggtcgcgggagcgctgcaggccggccaccgagtccggaatcgccaggataaacggcgcaccacccccgacctgctcgatggcagccgcagcgacaaaaccgcttttgcgcaggttggtcacccaatgcagccggccgttcagggtccagccgtcgtcagtgggttcggcgctgatctgcaaggcctcgataccggacaagaacttcatcgcgttggacaaccccgtggcccccgccaatttgccgctgagcaggtccggcaacagtcgctcacgtagccgcgcattcgggctttgcagcaaatattcgatgaacgaacgctggccccagcacacaaacgccgccgccagggaatggctggcaacattggcgatggcctccaccgcacccgccacatccccgcccaggccaccgagttgagccggtacgccgatacgcaatacattggcctctgccagccgtggcagcacttcctgtggatcgcaactgcccacgtccagggcctgcgcttgaacatcgagccaacggctcaagattgggtcaagcattcatgtttctccttttcacagcgggtgagccatcttcagcttgcgggtttttcccagcggtattgcgccagctccgggttcaacggggtgcgcgcaaacacgttagcgaagttgcacagggttgccaggctcacgcccaaaataacttccagtgcctggccctgggtataaccggcggccaggaacgcgtcaaaaccggcatcgctgacatcgccacgggtagcgatcacttcgcgggtaaacgcggcgagtgtttcgtagcgggcattgggcagttggccacgttggcgcagggcgtcgatgacttcttccggcaatttggctttgttgcgtgccacggcagtatggccggccacacagaaatcgcagccgtgggtggtggccgcaatcaactgcaccacttcgcgatcggccaggctgagttcggccttggcattcagcccggacacggtgatgtaggtctccagcgccgccggggcgttggccagtactgccagcaggttggggatgaagcccgagcctttcaacgcattttccaggaagggcttggccgcttccggcgcggtttcaggggtgagcaagggtacacgggacatggaggggtctcctgatgggttcgtgtaaccagtctgttggttataaaaaatcgtctcaataggctaaagtagcgattacttgctcttgagtctttccattagatgaattcgtccagtgcacttgtcgattggttattagacagcctcgaactcgacaccagcctgttccatgtgggccgctattgcggcgactggcatgccagcacccatggcctggcaagcgcgagtttccacctgattgtgcagggccagtgctggctgcatatcgagggcgacaccacgccgcatcggttggataacggcgacgcggtgttcctgttgcgcgacctggagtatcgcctgtccggtgagcccacggctgccggcgcccacgaatgcccccgtgtaccgatggagcccctggacagcgccgcccacgacggcgtcggcctggtctgcgggttcttccactttcagtccggcttgtcggcgatgatcgtcgacagcctgcccgcctggatcatcctgcgcgcaggcgacccttcgctgacggccgcgcgcaacctgttcgaactgatcctgcacgagtgcgagcgcgtgccggcgccctcttcggccctgcttgaacggctgtgccacctgctgttcctgtatgtcctgcgccagcaggtgctggacaaccgtgaactcggcggcctcgcggcgctggcccggcaaccggcgttcaccaacctgctggagcagttgatcgcccaccccgccgacacctggaccctggagagcatggccgcctgtaccgggctgtcgcgctcggcgtttttcaaacgtttcaatgaactgtgcggacagtcgccgggccaagtgctgctgatgatgcgcatgcgccatgcctgccagctgttcaagcaggaccagaccgtggcggatgtgtcgctggccgtggggtatcagtcggtggcggcgtttacccgggcgtttcacaaggtcaccgggcagcagcctggggcgtatcgcaaggcccaggcctagcgctgcaaaccagtgccgggccgggcgcaaagctcgatcagccagtctacaaatacgcgtactcgctgggacagttggcggtgtggcggatacagcgccgacagggccattttcggcaccgccaggctgggcaatacctgcaccagggtaccttctgccagttgacgcgtcgcgtggtaagccggcgcctgaatcaagccgaacccggcttcacaggcagcgaagtagccatcggaactgttcaccgccaagccttttgacaggttgaacgtgcgcaattggccgtcgacttcaaactccaggccaaagcgtttgcccgtgacgctggagacgtactcgaccatctgatggttggccaggtcctccaacgatgccggaataccccggcgcgccagatataccgggctcgccaaggtcagttgatccatcatcgccagaggccgtgccaccagcgattcatccagggccaaaccaccgcgcagcacgcaatccacgccttcacggatcaagtccaccgggcggtcgttcagactgatctccagttcgatgtgggggtagcgggccgtgaatgtcggcaatgcagggatcacgatcaagcgcccgatgcccgacggcatgtccacactcaaggtgccgcgcgggttctggcgttgcgtggaaaacaccgcctcggtttcctcaaggtccgacagtaattgcacacagcgctggtaatacgctgcgccatccagcgtcgggctgacttgccgcgtggtgcgctgcaacaattgcacgcccaggtgtgcctctaattgcttgatcaacaccgtgaccgaggcgcggggcagttgcaggctgtcggcggccttggcaaagccacgcagttcgacgatccgggtgaacacgcgcatcgcgttgaaacggtccaaggggcggttccttgcgctgattatttagatattacgaatagtgttagtgcttttagccggtttatcgcagttttgtcgagcgtgacaatgcaggccttcccacccaaggagcaacacccatgcatacccgccaactcggtacacacggcccactcgtctcagccatcggcctcggctgcatgggcatgagcgatttctacacccccggcagcgacacccgcgaagccatcgccaccctgcaccgcgcactggagctgggcatcaacttcctcgacaccgccgatatctatggcccgcacaccaacgaaacactgatcggcaaggccatcgtcggcaagcgcgaccaggtgttcctggccagcaagttcggcatcgtgcgtgacccggccaaccctgccttgcggggtgtgaacggccgccctgaatacatccgcaacgccatcgacggcaccctgcgccgcctgggtgtggagaccctcgacctgtactaccagcaccgtatcgacccggacgtcgccatcgaggaaaccgtcggcgccatggccgaactggtgcaccagggcaaggtgcgttacctgggcctgagcgaagcctccgccgccaccctggaacgtgcccacaaggtgcacccgatcagcgccctgcaaagcgaatactcgctgtggagccgcgaccaggaacataacggctgcctcgccacctgccagcgcctgggcatcgcctttgtgccctacagcccgctgggccgtggctttctcactggcgcgctgcaaagcccggacgacttcggcgccgatgactaccgccgcttcagcccacgcttccagggcgagaacttcgccaagaacctcgaactggtcaaacaggtgcaggcgctggccgccgacaaaggcatcagcgccgggcaattggccttggcgtgggtgctggcgcagggtgatttcatcattccgattcccggcaccaagcggcgtaaatacctggaagagaatgccgccgcgctgtcggtcagcctcagctcgagcgaactggcggccctggaggctatcttccccgccgaggcgcccgctggcttgcgctaccccgaggcggtgatggccatgctggatatctgaatcgaaaccgcgccgctcaccggcgcggttttttcttgcacgatagtacctaaagctccgccctgccaggccgatagccctacgaagctctaacaaagccgcgtcgataataaacgcttcgtaaggacgaccccatgcccccactgcgctccatccaagcccgctataccctgttcctggtgctgttcgtcctggtgttattggtgttgaccgtagtgggtatcggccagttggtcgcgcccaaactgcagcacaccgaagaacaggtggtgctcaaccgtatcgccgaggtcgccgagcagatccagggcgaactcaacaaggtccagtcccagcaacgcagcatcacccagaccgttccattgctcgacagcgatgccatcgacaaggtcctgccgggcctggtcgaccagtatggcgagctgaaagtcttcggcggcggtatctggccgctgcccaaccagcgcactccggggcgcaacaagcacagtacgttctggcaccgcgatgcgtcaggcaagctggccgtgaacaccttctggaacagcgacccggcgcccaactattacgaccagagctggtacaagggcggcctcgcctcgcctcgtggtcaatgtgcctgggccgccgcctacaaggacgacgccagccaggagccgcgcaccaactgcgccatggcgatccagcgcgacggcgtgccctacggtgttgcaaccatcgacgtgaccctgggcttcttcaatgacttggtcgccagcaaagagaaagacatcggcgggcaaatgctgatcgtcgaaggcgacggcaagatcatcagcaacagctcgcgcatcagcggcccggtggtgttgaaaaacatcagcgaactcaccggcacctcggcgtttgccgcccaggtcagcaaagcgctggcccaccgcgaccaggcgctgcaacgcaatgagttcgacaaccagggcgtggccagcaccttctacatgcgccctatcgaaggcaccccgtggttcctcgccaccgccctgcccacctcgctgatcaccgcccagcgcaatgacgtgctcggcaccctggcgctgttgcagatcccgatggtgctgctgctggtgttgctcgcagcgtatgcgatccgccaactggtgcagcgcatgaagacgctgaaaaccaatatcgacgcactctccgccggcgacgccgacctcacgcgacgcatcaccatccgcgccgaagacgaactgggcgccatcggccattcggtgaaccgctttatcgtctacctgcaaaacatgatcggcgaagtgacccaggctaccggcgccatgtcgtcgagcctggcgcagttgcaacagacctcggcgcataccaaccagatcctggtgcggcatgcctcggagactgaccagacggtgaccgccatcaccgaaatgagctccaccgccgacaccgtggcgcaaaacgccgccgaaaccgccgcattcacccagcgcgccaacgagcatgccgaccgttcccgcgtggtcgtcggtgaggcgtccaacagcgtcagcgcgttgatcggtgaagtctccagcgccacccacagcgtggagaacatgcgccaggacgctgcgcgcatcaccgaaaccctcggcgtgatcggcgcaattgccgggcagaccaacctgctggccctcaatgccgccatcgaagcggcgcgggccggcgagcaaggccgtggtttcgcggtggtggccgatgaagtccgtgcgctcgccgcacgcacccaggccagcacctcgcagatcaacgacatgctcacgcgcctgacggcaggcgtgagttcctcggtggcggccatggaaaacacccaggccagttgccagtcggcggcggacgccactgcgcgggtaaataccgggttggatgaaatggccggctccgtcagccacatcaacaacctcagcacccagatcgccacggccgccgagcagcaaagcgcggtgaccgaggagatcaaccgcagcatggtgcagatccgacaaatggtcgaagagctggtgcagagcggccacgctaccgaaaacaatacccagagcctgctggaggcgaatggtcgggtgattaccttgatgggtcgattcaaggtgcgctgataaacggctgagacactcccgtgcaatgtgcgggagtgggactattctgacagttccaagacgcacaggaggtgtgccatgcgcgcagccgagcagtcggtccgcttggagcggatcagtcaggaacgttttatccacgctcccatcgatgccgtttatgactatgtgacccagccggatcgctggcacgaatggcatcccacgtccctcggtgccgacaccggcaccaccggctctctccccgccggcgcccgcttcaccgaaatgatcgacctgctgggcgtacgcgtccccatgagctaccgcgtgcaaatcgcccggcgccccggcgagttcaagaccgtgtttacgtccctggccgtggatggttcgattcattacttcctcatgccccaccagggcggcacactgttcaagcgggtgctgacctatgaaaccgaactgcaactggccaccctgcatgaacgcatgatcgagctgtcggcgattgccctggaccagctcaagcaccggctggaaaacccaccgttcgtataatcttgaaacattctcgccgtgcaggcgctggcttgcctgcgatgacgtcgtcatgatcgccgccatcccaatggtcacctcctgcacgcgagatcctatgaaaaccccattgcgcctggccctgctgtcaaccctgttcaccgccaccctggcccaggccgctgacctgatccccatcgacgtgcaccgcgacgccaactgcggttgctgtaaaaaatggatcagccacctggaaaacaacggcttcaaggtcaatgaccatgtcgaagccgacatgagcgccgtcaagcaacgcctgggcgtagcgccgcgcctgggctcgtgccacaccgccgtgatcgacggcaaattcgtcgaaggccacgtgcctgccgaacaggtgttggccctgcgcaagcgcgacgacctgctgggcgtcgccgcatcgggcatgcccatgggctcgccgggcatggaagtggaaggccgcagcgaggcctatcaggtcatcggcctgacccgtgagggtaaagacgtggtggtggctgaatacccggcgcaatgatcgcgggttacctcgggcttttcttcgcggcgttcggcgccgcgaccttgctgcccctgcaatcggaagcggtgctggtcggcctgctgctcagcgggcattacagcctgtggctgttgctgggtatcgccaccctgggcaatgtgctcggttcggtggtgaattggtggctggggcgctgggtggagcacttcaaggggcggcgctggtttccggtgaatgaccagcaactggacaaagcccgcaagcattaccagcgctgggggcattggacgctgttgctcagttgggtgccgatcattggcgacccgctgacgttggtggccggggtgatgcgcgagccgttgtggcgattcctgttgctggtgaccctggccaaaggcctgcgttatggcgtgctggccgccgtgaccttgcaatgggtgttaatccccacttaatcgccagttaatccttgggcaacagcatccgaaccctctttctcggagccctgcccatgcctctgttccgcgctttttgcatcgccggcctgctcacggccaccgccgccccggtatttgccgccacctacggtcctgaactgcaaggctttgaatacccctatccgctcaagcatttcgagtttcagtcccaaggcgaatccctgcaaatgggctacatggacgtgccggccaatggcaagcccaacggccgcagcgtggtgctgatgcacggcaagaacttctgcggcgccacttgggaaggctcgatcaaggccctgagtgacgccggctaccgcgtgatcgcaccggaccagatcggcttctgcagttccagcaagcccgatcattaccagtacagcttccagcaactggcgctcaatacccaccaactgttggaaacgctcggtattcagaaggccacccttatcggccattccaccggcggcatgcttgccacgcgttacgccctgatgtaccccgcgcaaaccgaacagttggcgctggtcaaccctatcgggctggaagactggaaagcgctgggcgtgccctcgctgagcgtcgaccagtggtatgcccgtgaactgaacgtcagcgccgagggcatccgcaagtaccaactcaatacctactacgtcgggcgctggaagccggagtacgagcgctgggtagacatgtacgccggcctcagcaacggccccgggcatacgcgggtcgcatggaactcggcgctgatttacgacatgatcttcacccagccggtgtactacgagttcaaggacctgaagatgccgacgctgctgctgatcggcacatcggacaacaccgccatcggcaaggacgtcgcgccaccagccgtcaaagccaagctcggcaactatgccgtgctgggtaaacaggtggccaagctgatcccccgcgctaccctggtggaattcccgggcctggggcatgcgccgcagatggaagaaccggagcagttccacaaaacgctgttgcaggggctgaatgccctttaatccaaactttttcgaggcactcgtgaatgtcggtacagattgcagtcattgatgattggcagaatgtggccagtggcgtggtggattggtcagtccttgaagcggtgggccaagtgcacttcctgcacgactacccggcggataccgccacgatgatcgagcgtttgcgggagttcgaggtgatttgcgtgatgcgcgagcgctccagcttcgacaaggccctgctgcaaggtctgcccaagctcaaattgctggtgaccggcggcatgcgcaacgccgccatcgacattcccgccgccaagaccctgggcatccaggtctgcggcaccgacagctataaacacgcagcccccgagctgacctgggcgttgatcatggcctccacccgcaatctggtggccgaagccaactcgttgcgtgccggcgactggcaggtggggctcggcggcgacctgcacggcaagaccctggggattctcggcctgggcagcattggccagaaggtcgcgcaatttgcccaggtgttcggcatgcgcgtgattgcctggagcgaaaacctcacgccggaacgggcagtcgaggttggtgtgacgtgggtcagcaagcaagcgctgtttgaacaggccgacattctcaccgtgcacctggtactcagcgagcgcagccgtgggctggtggatgcccaggcgctgggctggatgaaacccggcgcgcgcctggtcaacaccgcacgcgggccgattgtggatgagcaggcactggtgcaggccctggaaagcggccgcctgggcggggcggcgctggatgtgtatgccgaggagccattgccggcggatcacccgttccgcaggttaccgaatgtgctggccaccccgcacgtgggctatgtgagcgagcagaattaccggcagttctattcacagatgatcgaagacattcaagcctgggccaaaggagcgcccattcgcgtgctgggctgacgcaccatcccagggcgctccgcacaagcgcggcgcccacccgaccttgtagtgagcaggcttgccctgcgctggggcgcgcagcggccctgaatatcggttcaatcttcgaaagtcccggttgggagcgcttcgcactccagcgcagggcaagcctgctcaccacagggtccgctccaccctggcatatggttacaatttttttgtcctacaaaatcttcctagaaaccctacaggctctgggatctgtcctagactcatgaccgatgggtccgttccaaaacaaaaaccccgcagaaaatctaaacttttcaactcggccattggtcaagttttaaggtacgacgagcgcacacggttccagcccgatgcccgtccatccaatctatatctgccaaccgtgcaactggcataagccttgccagatctgtacagcgcttgtgcgcgtggccgcaggatgcggtcgacggagttaatggcagccggccattagccgaccaacacgtggagagaactatgatcagtgccgcagcaagtattcagggagagcgtgttagtcagaccgttggcggggcaaccgcgttggctgacctcaccacggtgcggccggttcccacctacaaccccaaccgcaagaaagtcctgtttgtgacctccgagttcgccgacctggtgaagaccggcggcctgggcgacgtctccgccgccctgccccgcgccatggcccacctgcacgatgtgcgggtgctgatccccggttatccgcaggtgatggaaagcgacaacccgatccatatcatcggtgagctgggtggccacgccgcgctgccgccgtgcaagatcggacgcatggacctcaaggatggcctggtcatctatgtactgatctgccccgagctctacgagcgcgaaggcacgccgtacggcgccaacaacggccgcgactggccggacaaccatattcgcttcgcccgcctgggcctggccgccgccgacatggccgccaacctggcgcagatccactggtgcccggacctggtgcacgcccacgactggcccgccggcctggccccggcatacatgcactggcgtgggtcacgcacgccaaccctgttcaccattcataacctggcctatcaaggcgtgatcagcctggcgtcgacgccagagctgggcattccaccccacgccctgcaacaggaaggcatggagttctacggcaagatgtcgttcctcaaggccggcatggcgtattccagccacatcaccacagtgagcgccacctacgcccgggaaatcaccacacccgagttcggctgcggcctcgatggcttcctggccagcaagacccagcaagggttgctcagcggtattcccaacggcatcgaagacagttgggaaacctccaccgacccgcacctgacgcacaacttcaacattggcgactgggacggcaaggcggtcaacgccgcccaggtacgcaacctgttcggcctgcatgattcgagcggcccgctgttcgccgtggtgtcacgtctggtgttccagaaaggcctggaccttaccgaagcggtggccagctttatcgtcgagcaaggtgggcagatcgccattatcggtcgcggcgagccggaagaagaaaacgccatgcgtgaactggcgctgcgctttcccggccagatcggtgtgcgcatcggcttcaacgagaccgatgcgcgccgcatgttcgccggcagcgatttcctgctgatgccgtcgcgctacgagccctgcggcctgagccagatgtacgcccagcgcttcggctcgctgcccgtcgcccgcaacaccggcggcctggccgacaccatcgaaaacggcgtgaccggctttctgttcaatgaatccacggtcgacagttacaaagaagccttgagccgcgcgttcaaggtgtttgccttccctggcctgctcaatgccatgcgcagccgggcgatgacccaaccgttcaactggagccaggcggtggaaccctacgccgaactgtacgagcagctggtggctaaagcactggggaaatccgctaaataatcaacgggaggtctctatagatgccgttacggactctggaaacctggccccacggcgcaatcatgctggacgcgcaacacacgcgtttcgccttgtgggcgccagacgcattttatgtcagcgttgaattggaacacggcaagtccatcgccatgctgccccaggcagatggctggttcgaaaccgaaatagcgtgcccggcgggcacgcgctaccgcttcaatatcgatggggaaatggatgtacccgaccccgcgtcccgcgcccaggccgccgatgtgcacggctggagcgtggtggtcgactccctcgcttatcactggcgccacagcacctggcaaggccgcccctggcacgaggcggtcatctatgaactgcatgtcggcgccatgggcggttatgccgccatcgaaaagcacttgccacgcctggccgagctgggggttaccgcaattgaactgatgccgctggcgcaattccccggtgatcgcaactggggctatgacggggtcctgccctacgcgccccaagcttcctacggcacgcccgaacagctcaagcacctgatcgacagcgcccatgagcacggcctggcggtgatcctcgacgtggtctacaaccacttcggcccggacggcaactacctgggccagtacgccaagggtttcttccaggaagacgtgcacacgccctggggcgccggcatcgatttcaatcggcgcgaggtgcgcgactttttcctggataacgccttgatgtggttgctcgaataccgcttcgacggcctgcgcctggacgccgtccacgccatcgacaacccggactttctcaaggaactggcacaccgcgtgcgcgagcaggtggataccggccggcacgtctggctgatgctggaaaacgaactcaaccaggccagcctcctgcaacaggatttcgacgcgcaatggaacgatgacttccataacgtcctgcatgtgctgctgaccggcgaaaccgacgcctattacagcgacttcgccaaggagcccacggccaaactggcgcgctgcctgggcgaaggttttatttatcaggggcacaccacccggcacgggcatgagcgtggcgaacccagtgggcatctgccgccgagcgcgtttgtggcgttcctgcagaaccatgatcagatcggcaaccgcgccctgggcgagcgcctgcatcaactgtgctcgccacaggcactgagggcggcgaccgcactgctgttgctctctccgatgatcccgctgatgttcatgggcgatgagtcgaatgcccgcgagccgttcctgtttttcaccgatcaccatggcgaactggcagaagcggtgcgcgaaggccgccgcaatgagttcaaggatttcgccgcgttccaggacccggaacgacgcgagcgcatccccgacccgaatgccctgccgacctttttgcagaccacgccgaacttcgacgacaacgaacacacccagctgtatcgccagttactcagcctgcgccaccgtcatatcgtgccgcacttacccggcagtatggccctgggcgccgaggtcttggccgaaggcgccgtgagcgcccgttggcgcctgggcgatggcagcctgttgcagattgacctcaacctgagtgccacgccgctggatcagccggcgacggcgcctgtcctgtttgaaacgcctgccagtaccggcgcacacctgccgccgtacagcgcacgcgtcaccctatcccctgttggagagcacccttgagcgaagcgaacctggaaatcctcgccagccgagcgggcctggccgtcgattggatcgacgcaaacggccgcccgcaacaagtgaaacccaacgccctgcgcgccgtcctcaaaggcctgggccaccccgccgacaccgatgccgaggtcaacgccagcctgctggccctggaacaggtgcaacaagacaaacacctgccgcccctgctgaccatcgacagcggcgcaggcctcgacctggcgcgctacttcgaaccggacaccctgtgccgggtcagccttgaagacggtgaaaccctggagttgcgcctcgatggcgacgcggtcctgcccggcgtcatcgccctcggctaccaccaagtgcacattgccgaccagaccttcaccctggccgtcgcccccacccactgctacagcgtcgccgaagcggtcgacaaccgccctgcccgcgcctggggcctcagcgcgcaactgtacagcttgcgccgcctgggcgatggcggcttcggcgacaccctggccctggagcacctggcccgctcggcggccgagcgcggcgccgacgccctggcgatcagcccgatgcatgcgatgttcagcgccgacaccgcgcgttacagcccgtactcgccctccagccgcttgttcctcaacagcctctacgcgtcgccgggttgcatcctgggtgagcgcgaagtgcgcaacgccatcgaggccagcggcctggcggatgaactgcacgacctggagcaacacagcctgatcgactggcccactgccgccaacgccaaacagcgcctgctgcgtgcgctgtatgaagacttccgccatggccaccacccgcaacacgccgacttccagagtttccgccaggccggcggtgaggccctggaaaaccactgccgtttcgaagccgtgcaagcgacccgcgccgctgccggtgaagacctcgactggcgccactggccagaagactggcgcacgccgcagagcccggcattggcgcggttcgccgaagaccaccgtgacgagatcggctacttcgccttctgccaatggctgatcgcccgttgcctggagcgcgcgcaacaagccgcacgcggcagcggcatgggcgtcggcctgattgccgacctggcggtgggcgccgacggcggcggcagccaggcctggagccgccaggatgaattgctcgccgacttgaccgtgggcgcgccgcccgacatcctcaaccgcgccggccagggctggggcatttccgcgttctcccccgaaggcctcaagcgccacggttttcgcgccttcatcgaaatgctgcgcgccaacttcgcccacgccggcggtttgcgcatcgaccacgtgatgggcctgcaacgcctgtgggtgatccccatggacgcctcgccgcgtgacggcgcgtacctgtattacccggtggacgacctgctgcgcctgctggccctggaatcccaccgccaccaggccatcgtgctcggtgaagacctgggcaccgtgccggacggcctgcgcgaaaaactcatcgcccgctcgatcctgggcatgcgcgtgttgctgttcgaacagaaccacgaaggccagttcaagccgatcctcgactggccggacaacgccctggccaccaccagtacccacgacttgccgaccctcaacggttggtggcacagccgtgatatcgaatggaacacccagctcggcctgatcgatgcgcccaccgtggagcaatggagcgagcaccgcctgcgcgaacgccaggcactgcgccaggccttgagccaggacccgcagaacttcgtcgaagagatccgcaatgaaaccgaccacatgatcgacgccagcgtacgctacctcggccacacccgcgccccgctggtgctgctgccgctggaggacgccctgggcgttgaggaacaagccaacctgcccggcaccaccgacacccaccccaactggcgccgtcgcctgccgggtgaggcgtctagcctgctcgacaatgccggcgccgcccgccgcctcgaactgttggccgtcgcgcgcaaccaagcctatgagcgtgaccgatgaaagccctgcccctgcgcgccacccagcgcctgcaattccataaaggttttaccctcgatgacgcggtgccgctggtgccgtatttcgcccggctgggcatcagtcacctgtatgcctcgccgctgctcagcgcccgcgccggttccatgcacggctacgatgtggtcgaccccaccacagtcaacccggaactcggcggcgagccggccctgcggcgtctggtcgcggcgttgcgtgaacacgacatgggcttgatcctcgatatcgtctccaaccacatggccgtcggcggtgccgataacccctggtggctggacctgttggaatggggccgcctgagcccctacagcgagttcttcgacattcagtggcactcgccggaccccttgctcaaaggccaattgctgatgccgttcctcggcagtgactacggcgaagccctgcagaccggcaccctgaccctgcacttcgatgccgaccacggcgcgttctacgtcgagcattacgaacaccgcttccccatctgccccaaggattacgccgcgatcctgggcaccgatgaatcgctcaagcccctggccgagcgcttcagcgccctcgcctaccaggacgacgcctaccacgaggccgcgtggctcaagcaagcgctggccgagcgcgccaccgaggtgctcccggcaatcgaacaacgtttgacggccttcgacgggcgtcagcccgagggcttcaaacgcctgcatcaattgctcgaacaacaggcctaccgcctggccagttggcgcacggcggcggacgatatcaactggcggcgcttcttcgatgtgaatgaactcggcggcctgcgcgtcgagcgcagcgctgttttcgaagccacccacggcaagatcttcgaactgatcggcgaaggcttggtggatggcttgcgcatcgaccatatcgacggcctggccgacccacgcggttattgccgcaaactgcggcgccgcgtggactcgctgtcgcctgagcggcacttgccgatcttcgtcgagaagatcctcggcgaaggcgaaaccctgcgcgacgactggcaggtggacggcaccaccggctacgagttcatgaaccagttgtcactgctgcaacatcacccggacggctttgcgccactggctgcgttgtggacccgtcacagcgaacggcctgcggcgtttatcgaagaagcgcaattggcccgccagcagatcctcaacggctccctcggcggcgacttcgaaagcgtggcccaggccctgctgcaagtggcccgcgacgatgtgatgacccgcgacctgaccctcggcgccatccgccgggccttgcaggaactgattgtgcatttcccggtgtaccgcacctatatcagcgcccgtggccgcagtgccgccgacgacaggctgttccagcaggccatggacggcgcccgcacgaccctgggcgaaggcgactggccggtgctcgaccacctggccaactggctgggtggccagccgtggcgcaatcgcccggtgggccgtgaacgcaagatcctcaagcacgcctgcgtgcgcttccagcaactcacttcgcccgccgccgccaaggccgtggaagacaccgcgttctatcgctcggcggtattgctgtcgcgcaacgacgtgggcttcagcaccgagcagttcagcgcgcctttggccgacttccatggggtcaaccagcaacgcctgcagagctttcccgacaacctgctggccaccgccacccacgaccacaagcgcggcgaagacacccgcgcgcgcctggcggtattgagtgaatgtgcgccctggtacgtcgagcaggtcgagcagtggcgcgccctcgccgcaccgctgaaggcggaggcaaacacgccatcggcgggcgacgagttgatcctctatcaggtgctgctgggcagttggcccctggaccagaccgacgacttcgagggctaccggcaacgcctgtggcagtggcagcaaaaagctctgcgtgaagccaagttgcaaagcagctggagcgcgcccaacgaagcgtatgaacaaggcgtcgaagccttcctgtcgcggctgctgctcagcgatgaaggccacacgttacgcactgccatcggcgccgctgcccaggccatcgcgccggccggtgcgctcaatggcctggcgcaatccttgcttcgcatgacggtgccgggtgtaccggacctgtaccagggcgatgagttctgggacttcagcctggtcgacccggacaaccgccgtccagtggatttcaacgcccggcaacaggcactggataccccaccggacatcggcgaactgttgttcaactggcgcgacgggcgtgtcaaacaggcgttgattgcccaggtgctgggcttgcgcaaggcctgtcccgagctgttccgcaacggcacctacacaccgctgcaagtgcacggcaaacacgccgaacgggtggtcgcgttcgcgcgtgaataccagggcaaacacctgctggtggtggtaccgaggtggccgcaggacctgcttgaaaacggtgtgcatccaatgatcaatgcgcaggtttggggcgatacgcgggtgaaattaccgttcgccgcgtcaaccaaaaactggaagggactttttcatacaggcgcagtcacaccagacaaggagctgttgatcagcactgccctgggggatttcccggtcaatgtctttatcaatcctgatgatcaagaaagctgaaaattctctgtgaggagcattgcgatgagtactgacgaaaaacgcataaaagagttggcgcaccagatctgggagtccgaaggcaagccccatgggcaagacgcgcggcactgggagatggcgcgcaaactggccgaagccgaagcgctgacgccgagcaaacccaaggcccccgccaagcccaagccaccggtcaaagccaagccggccgcgagcaagccggcgccaccggccgctaaaaaaccacccgccgcgaagaaacccaagccttaatcccccacctcttgtcggcgctgtcggcaagaggtgattccacctaccagactctcagctgaaatttcgtcggcacggccgcgttcggcctgaagaaagacccttgcaggagcaactcaatgagcaaacccgataaaaccccatcgacgccgggcaacgaaccgtcgcgaatccgtgaaggtttgcccttcccgctcggcgccacctgggatgggctgggcgtcaacttcgccctgttctcggccaacgcgaccaaggtcgagctgtgcctgttcgacgacaccggcgaggtcgagctggaacgtatcgaactccccgaatacaccgacgagaccttccacggctacctgcccgatgcccatcccgggctgatctacggctaccgcgtgtacggtgcgtacgacccggccaacggccaccgcttcaaccacaacaaattgctgatcgacccctacgccaagcaactggtgggcgaactcaaatggtcggaggcgctgttcggctacaccatcggccacccggacgacgacctcagcttcgacgaacgcgacagtgcgcccttcgtgcccaagtgcaaggtgatcgacccggcgcacacctggggcaacgaccaaccggtacgcgtgccgtgggaccgtacgatcatctacgaaacccacctgcgcggcatcagcatgcgccacccgtccgtgggtgaagctgtgcgcggcacctgcgccgggctgatggaagacgacgtgctcaaacacattcgtcagttgggcgtgtcgtcggtggagctgctgccggtgcatgcgttcgtcaatgaccagcacctgctgcaaaaaggcatgaccaactattggggctacaacagcatcgcgttttttgcccccgacccacgctacctggccagcggcaagatcgccgagttcaaggagatggtcgcgcacctgcatgagcagaagctcgaagtgatcctcgacgtggtctacaaccacaccgccgaaggcaacgagcgcggcccgaccctgtccatgcgcggcatcgacaacgcctcgtactaccgcctgatgccggacgacaagcgtttctacatcaacgactccggcaccggtaacaccctggacctgagccacccctgcgtgctgcagatggtcactgactcgctgcgttactgggcgacagagatgcacgtcgacggcttccgcttcgacctggcgacgattcttggccgctaccgcgatggtttcgacgaacgccacagcttcctcgtcgcctgtcgccaggacccggtgctgcgccagttgaaaatgatcgccgaaccctgggactgcggccccggcggctatcaggtgggcaacttcccgccgggctgggtggaatggaatgaccgcttccgcgacaccgtgcgtgccttctggaaaggcgatgacggccaattggccgacttcgcggcacgcatgaccgcctccggcgagatgttcaaccatcgtgggcgccgtccctacagctcggtgaacttcatcaccgcgcatgatggtttcacgctgcatgacctggtgtcgtacaacgacaagcacaacgaagccaacgacgaaaacaatcaggacggcagcaacaacaacctgtcctggaaccacggtgtcgaaggcccgaccgacgacccgcaaatcaacgccctgcgcctgcgtcagatgcgcaacttcttcgccacattgctcctgtcccaaggcacaccgatgctggtggccggcgatgaatttgcgcgcacccagcacggcaacaacaacgcctactgccaggacagtgagatcggctggatcaactgggacctggacgaagacggcaaggccctgctcaaatttgtgaagcgtttgatcaagctgcgcctggcctacccgatcctgcgtcgtggacgcttcctggtgggcgactacaacgaagacatcggcgtgaaggatgtcacctggctcgcgccggatggcaacgagatgaccaccgaacagtggcaggacagccacggtcgctgcctgggcatgttgatggatggccgcgcccaggaaaccgggattcgccgtcccggcgccgacgctaccttgctgctggtggtcaacgcccatcacgacatggtcaacttccgcttgccgccggtgcccgaaggtgagttctggacctgcatgctcgacaccaacgagcccgccgtacgcggccaggaacgctttgagttcgatcacgagtacgccgtgaccggccgttcgctgttgcttttcgagctgcagcgcgaagacgaggtgtgagatggctctgcatggattccttcaaggcttccggggctatgcggacacgcaagccctgggcgacgccctgaaggcgcttcaggaagaaggcctggaccacctaccgctgcccggcggcggtcagaccctggcgcggttcagtcgcctggcgcaggtggcgggtcatgacctgcgcctgtgcaagctgttcgaaggccacaccgatgccctggcaatcattgccgagctcaactccccactgccgcccttgggcagcacgtggggcatgtgggccgccgagccgccaacggccaaggtgcgcgtgcaccaggagggccatcgcctgcgggtgcaaggccgcaaggcctggtgctccggcgcggcggtggtgagccatgggttgttgaccgcctgggacgaagacgatcgccagcagttggtggccgtgcacatggatcaacccggcatcgtggtcagcgatgaggggtggaacgccgtgggcatggcagccaccggcagtgtggaggtcgtgttcgacggtgcctgggggctggcggtgggcgggccgggagattacctcgcccgcccagggttctggcaaggcggtatcggtatcgccgcctgctggtacggcgccgcgcagcgcctggctgaggtcttgcgcgcgcagtgcagtaaacgcccggaaccccacgccctggctcatctaggcgccgtcgacagcgcactgaacagcgccgcctgtgtgctgcgtgccagcgcggcacagatcgaccttgagcccaaggctgatgcccggcaattggcccagcagacgcgggcctgtatcgaagacaccgttgagcaggtgctgcgccacgtcgggcgcgccgtcggtgcgggtccctactgcaaggacccgcactttgcccagttgatggcagacctgccggtgtatgtacgccagagtcatgccgaacgcgacctggccgggctcggagagctggtggccggtgaacccacagggaggtggcagttatgagatccaatccgatcgttggccagggcacgccgctgcatcactggcaggcctcgccgaaaatggccgacttgccgtcgatcagcgtcgagcagttggtgcccgccggccaccgtgcggtgatcattgcaccgcatccggacgatgaaatcctcggctgcggcggcctgatgcagggcctggcggcgctgggtcggccgatccaattgatttcggtgaccgatggcagcgccagccaccccggctcgcagcgctggccagtggagcgtttgagcgtggtgcgcccgcaggaatcggcccaggccctgcaccgcctggggttgccgctgcacagtttgaaatggctgcgcgccggttttaccgacagccaggtggcggcacgcgaagctgacctcgtggcgtttatccaacgctacctcaagtctaccgacgtggtgttcaccacctggcgcgaagacggccattgcgaccatgaggccgtggggcgtgccagcgcccaggcctgcgcggcggtcggcgccaccctgtatgagctgccggtgtggacctggcattgggcaacacccgaagacagcgtggtgccctggcaccgtgcacgcaagatcccgctgacctgtgaggccgtcgctcgcaaacggcatgccatccacgccttcgccagccaactggaaggcgacccgcagatcggcctcgcgccggtgctggcgccctacgtggtggagcgtctgttgcaaccctttgaagtggtattcgtatgagtgtggccacgccttatttcgaccagctgttcgccaataacgatgatccctgggcctttcgccaacgctggtatgagcggcgcaaacgcgcactgaccctggcgatcctcacgcggccacgctacgcctcggtgttcgaacccggttgcgccaatggcgagctgagtttcgaactggcaccgcgttgtgaccgcctgctgtgctgcgacaccgccgcggccgccgttgacctggcgcgcactcgcttgctggggttcccccaggctcaggtgcagcagtgccgcttgcccgaacagtggcctgcgggccagttcgagctgatcgtattgagtgagtggtgctactacctcgacgccgatgacctgggccaattgatcgatcacgcccgcaccgcactgaccgccgacggccaattgctggcctgccactggcgcgcgcctatcgacggttgcccgcaaacggctgagcaagtgcacgccctgctccagcaacgcctggacatgccccgcatcgccagccaccacgaacctgatttcctgctcgacctgtggagccgcgacggcacctcggtcgccacccttgagggcctgcgatgatcggcattctgatcccggtacataacgaagaggcgttgctcggcgactgcctgaaagctgcgatgatcgcggccagccatcccgggttgctcggcgaagcggtgactattctggtggtgctcgacagctgcagcgatgccagcgccgccattgcccaggcctacccggtgcagtgcctggaagcccaggtacgcaacgtggggcatgtgcgtggcgtgggtgcgcggcatttgctcaatcagggcgcacgctggatctcctgcaccgatgctgacagccgggtggcccccgactggttggtggcccaattggcgttgggcgtggacgccgtgtgcggcaccgtcacggtggatgcgtggagcgagggttttgatcccgccgcgcagattcgctacctccagggctacgaggctcgcgacggtcatcggcatatccacggggccaacctgggggtgagcgctggcgcgtacgtgcgtgccggtggtttcgagccgctggcgtgccacgaggatgtgcaattggtgcgcaacctggagctgtgcggcgcctccatcgcctggagccacggcccgcaggtgattaccagtgcgcgcctggacgcccgtgcacaagggggattcggcgattacttgaagagcctgatgcatgccacgtaaaaaaacgccgttaccgaatgtgaaaccgcgcaatccttgtctatgctgagaacgccttgctggcattccagggttggggtgccatgcagccactacggcggagcctgtggtggaaacaagagagtcgtcccgtcaacggggcacgaccccgcatcaaccgacaaggatgtgacaccccatgaagcttgcttccttaagcgacggccgccgcggccccgcgcaagtctggaacagcgccccgcagttggcgcaaatcccccccattacgccctcctcattagtgccgcctggcgcacgcgtggtgatcatcgcacctcatccgggcgatgaggtgctggcctgcggcggcttgctgcaattgctcagcacgctggaacacccgctgcagctgatctccatcaccgatggcagcgccagccacccgggctccaacgtctggccggcgagccgcttgagcgtggtccgcccccaggaaagcgccgaagccctgcgccgcctgggcatgccgctgcacagcctgaagtggattcgcggggggttttgcgacaacgccctcgccgcccgcgagccgcaactgagccaattcattgcgcgctacctgcagcccggcgatgtggtgttcagtacctggcgcaacgatggcaatgacgaccatgatgcggtgggccgtgccagtgccaaggcgtgcagcctggtgggcgcgcagctgcatgaactgccgatctgggcctggcactggccggcccgcgaaggcgcgatcatcccctggcaacgcgcgcgcaaggtacgcctggacacctggaccgtggcgcgcaaactccacgccgcccacgcctatgccagccagctggccggggacccacagatcggcctgccgccgatactggcccaggtgctgctggagagaatgcgcgaaccgtatgagatcgtgctgtcctgaaatccaactcgttcatacctgttaattctgacagtagcggcctggcgaatgtgtggctagggtggaaaaagcgctgcaccgcttcaggtgcagtcgagaaagccatgccaaccctttgcattggccggtgttttcagaaacggttaacccgctgtccctgctccgtatcgcgcatcacgttgtcatggtctggcccgcacctgccttcgcaggtgccgggacaactctcccctcaagtgaggacggatcatgcgcgcacggacactctcctggttgtacctgatcgtcatggcggtgtggccgccgggctcttatggcgcctgcaccatcaacagtggcgccggcgatgacacctccaactgtgacatcggcacggcgccgggctttaccgataacgcgggtaacaacacactgaatatcaccgcgacgggccgggtgaccggcaatgtgacctttggcgcgggcaatgatctggtggatgtgaatgggccaagcgccgggattgatgggaacctcaaccagggcgatggcgcgaatatctttcggctcaatctgggcagcattaccgggtctgtcactcaaggtgatggccaggacgtggcgcagattactggcggtcaagccggcgccgtgcgtcaaggagcgggagtcgacaacctttccatcagtggcgggactatcgcttcgctcgaacagggcgacggtctggataactttttcatgagtggcggtacgatcaccggtgcgtttgaagacggcgaccgagccaggatgagcggcggcaccatcggccgcgtcgacatgaaactcgataacaacctgttcgacatgtcgggaggccgcatcatcggcaacctggtgaccggcttaggcaacgacaccatccggatctcgggcacggcgtttgtgggcggcaatatcagtgtcagcgccggtgatgatcaggtgaccgtctcgggcggcgaggtgaacgggcagatcctgctcagtttcggcaacgaccacttcatctggaccggcggcaacctgcactcgtttgtgcggatgggtgaaggggacgacatggcactcgtgcagaatctgacgagtgctcagttggcggcagcgcaattggtggacggcggcctgggcaacgacaagctcaccctggacaacaccaaggccggggatccgggcctattgcccaactgggaagccatccagctggacaatggctccgaactgacgctgagcggtacgaccctcaagctgggtgacagcagctccggtactggcacgctggcgctggatggcacgagcaagctgctggtcgggaccggcgtcatcgaagcctttaccgccggccagttggttaccgtcagcaacagcggcgtgatcgacatgaccaccggcagctccagcaccagcgactcattgaccatcaggggcaattacaccggcaatggtgggcgggttgaactgcaaagtgtgttgggcggcgacggctcgcccagcgacaaactggtgattgaccaaggtgccattgggggcagtacaacgatcagcgtgaccaacctggggggtgcgggtgcagcgacgctgcaggatggtatccaggttgtgcaggcccttaatggtgcctccggcagtgccaacgccttcaccctcgccggcccggtctccgcgggtgcgttcgactaccgcctgttcaagggcggtgtaaccgcaggcacggcaaagaattattacctgcgctccactgtcccggtgcagccaccaggccctgagatcatcgtacctttaccgagcccgggcgagcctcccccccctaaaccagggcccgatccaatccccatctaccgcaaggaagtgccgatctatgccgcaatgttcccggcggccgaccagatcgtgcgcgccacgctgggcacttatcacgagcgcatgggcgaccagaaccttcgacagagcagccatgcgctggacggctggggccgggtctacggcagcagcagccgtcaagggttcgccggcacggtgagcccgacgctggacagcacgctcgagggcttccaagtgggcagtgatgtctacaccaccaccgacgacagcggacgcaaccagcgcgttgggctgtttgtgggccacagcacactcaaaggcaacgtcaagggcttcaacggtggctggcaagacctggacgccggcaaaaccaccttgcgcgccgatagcctggggatttactggacactgatcggggctaatcaagcgtatgtggatctggtgctgatgggcagccggttcaacggcaacaacgaatcagaccgcggcgtgaagatgaaaacccgagggcataacatcacagcctcagctgaagtcggctggccgctccgggccagccaaaactggacggtagaaccgcaggcccaagtgatcgtcggcaagacaaggctcgacagccagaacgatggcatttccgacgtcaagtatgacgccgataccagcgtgacctcccgcctgggcttaaggctgcgcggcgactacaacatccatggcatggcgtggcagccctatgcgcgcgcgaacgtctggcatgccagcgccggggacaacagtgtgatttacaaccacacgacccggatcgataccgagcagaaatccaccatccttgaagtcagcctgggcgccaccttgcaggtagcgcccgatgtgagcctgtatggcgaagtcggctacaaccgcaatctggacagcaacacctacaacggccgcgaaggcactgtgggtctgagggtggcgttctaggtttgtatcgcagtgtgtacacagcccactgcgatacacagcctttaactcggcgggtttcctgaaacaggccagatacagcccggcgttcaactgagcacccggcacacatccagccgcaggaggctcgccatgcagactcagttgaaccgccgttccacacccctttttctggcctttgccctggcgcaattcggcatcctgggcatggcccacgccgaaatgcccgaggctgcgaccaaagttgtcgccagtacccaaagcgccttcggtgccctcaagcacgtcaaggctgggctgctggacgtggcctacgccgaagtcggccccaccaccggcccggcggtgatcctgctgcatggctggccctacgacattgacagctacgcccaggtcgcgccgttactggcggccaagggctatcgcgtgttgatcccttacgcacggggttatggcgatacgcgtttcctatcggctaacaccccgcgcaacggccaaccggcggcgctggccagcgatgtgatcgacttcatggacgcgctgaagatccagcaagcggtgctcggtggctatgactggggcgcacgctcggcggacatcgtgtcggcattgtggccggagcgggtcaaggcgctggtgtcggtcagcggttacctcatcggtaaccaggcggccggcaagaacccactgccgcccaaggctgagttgcaatggtggtaccagttctacttcgccaccgagcgcggcgccgccggctaccagaaaaacacccacgacttcgccaagctgatctggcaactggcctcgccgcagtggaagttcgatgacgccacgttcgatcgcagcgccaaaggcctggagaacccggatcacgtagcgatcactgtgttcaactaccgctggcggttgggcctggtgcagggtgaaacgaaatacgacccgctggaacagagactcgcccaggcgccgtccattggcgtacccaccatcaccctcgaaggcgacgccaacggcgccccgcacccgcagccggaggactacgccaagcgctttaccggcaagtacgagttccggctgatcaacggtggcgtcggccacaacctgccgcaggaagcgcccgaggcgtttgccaaggcggtcatcgatgcggatcacctgtgatgaagcgcctgtgcatggccgcattggccctcgcgagttcggctggcaccttcgccgacagcgccccctcgccgatctacggcgtgactattcccgacggctaccgccaatgggaactggtggctccggcccaggaagccgacccgttgaacgagctgcgcgtggtgctgggcaacagcgctgcgctcaaggcttatcgggagggcacgttgcctttcccggatggcaccgtcctggccaagttggcgtggaaacacgagcagtcaccggatttcaagaccgcgtccatccctggcgcggcgaccacggtgcagttcatggtcaaggactcgaaaaaatacgcgtccaccggtggctgggggtttggacgcttcatcaatggcaaaccagccgatgaagcgcagcaccagacgtgttttgcctgccaccaggcgttggtgaaagaccgggattatgtcttcaccaggctggcaccctgaaagccagcccgttcaaggtctctggtcagaactggcgacaaataccctgtggcgagcgggcttgttgtggtgagcgggcttgccccgcgctgggctgcgaagcagccccaacaccggcagccgaagagtacctgattcaccgcatgcctccttccagggtcgcttcgcaacccaacgcggggcaagcccgctcaccacaaatgggagggtatcagccagatatggccggtttttcaaagactttgaaagggctgaccctgaaagcgcgaaaactgataggcgattcccagccagatgaaccaggccggcatcacgcacagtgccaggcgtgtatcagggcgcaacgccagcaggcccagcacaaaggcgagaaacgccagggcaaaccaggccattggcacaccaccaggcatcttgtaggtggattgggcgtgcaggtccgggcgttttttgcggtaggcgatgtaggacgcgaggatggtcgaccaggtgaagatcaccaggatcgccgacaccgtcgacacgatggtgaaggcggtcatcacctccggcaccacaaacagcaacaccagccccagcaacatcagcaagctggtaaacgccaggctgataaacggcacgctgctgttcgacaagcgccggaagatccccggcgcatcacccaggtcggccaaaccgaacaacatgcggctggcggaaaacaccccgctgttggcagacgacgccgccgaggtcagcaccacgaaattcacgatgcccgctgcggcggggaaaccggcgaccaggaacaattcgacaaacgggctcttgctcggtgacacctgctgccaggaggtcaccgcgataatgcacgccagggccagcacgtagaacaggatgatgcgcagcgggatcgagttgatcgccttgggcaaggtcttttccggcgcacgggtttcggcggcggcggtaccgatcagctcggtgccggcgaaggaaaagatcgccatctggaacccggcaaaaaagccgaacaggccgttgggaaatgccgcttgtttatccaggaggtggctcaacgaagcggtgacgccggtgggcgaaacgaaggaactggcgatcagcaccccactcaccccgatcaaggtcacaacggcgatgatcttgatgatcgcgaaccagaactccacttcgccgaacagcctgaccgtcagcacattcagcgcgaacagggtcagcaacatcgccaccgccggcatccaggccggtacatcggggaaccagtactggaagaaaccgccgaccacaacggcgtcgcccaccaccgctacgctccagctcaaccagtacgaccagccgagaaagaacgccgcacgcggccccaggtaagcaccggcaaagtcggcgaagctcttgaagttgaggttggacagcagcagctcgcccatggcgcgcatcacgaagtacacgaacagcccgatgatcatgtagatcaggatgatcgaggtgccggacagcgcgatgatcttgccggagcccatgaacaggccggtgccgatcgcgccgcccatggccatcaactggatgtggcggttgctcagggtacgttgcaacgcaggctgttcacacagcccgggcgtggttgttttcatcacaaaacctcttgttatgtttttgagttttggcagaagaaaagtcgaggggtcgttgttattggctgtggcgttcgaaaccgtgcagcacgttgaccgcattgatgccgatctcatcaaccatgtagccgccttccatcacgaacagcgtgggcacgccgacggtggcgatgatctcgcccatgccgaggaagtcttcgctgtcgaggaggaagtggctgatggggtcgtccttgaaggtgtcaacgcccagggagatcaccaacacttcaggcgcaaagcggcgcagttgctggcaggcgtctatcagggcggttcggtaatgggtccaggtggtgtttttcggcaacgggtagttcaggttgaagccctcccccgcaccgacgccgcgctcgctgccggcaccggaaaaatacgggtaagacaccgtcgggtcgccatgcagggaaatgaacatcacgtccgggcggtcatagaaaatattctgggtgccattgccatggtgaaaatccacatccagcaccgccacacgcgtggcgccctgggtgatggcgtgctgtgcggcaatcgcggcgttgttgaggtagcagtaaccgcccatgtattcacgggccgcgtgatggcccggtgggcggcacagggcaaaggcgctgtgatggccttcgtcgagcaacgccaggccggtcagtgcgatgtcggcgctggtcttcaccgcctgccaggtggtgcgggtaatcggcgaaccggcgtccatcgcgtaaaaaccgagcttgccgtcgatgaacgccggcacctgctggttggccaggtcgcgtaccggccacaccagaggcaaggcgtcatggctgcggccgatggcagtccattcggcccaggcggtttcgaggaacgccacgtagcgttcgctgtgggcggcgacgtagcaggcccggtcaaaacggcgcggcgtgatgatatcgcccagcccaacctgacggacccgatcacgcacggtgtcggcgcggctgggttgttcgaacgagggtttgagcacaccgtccttgagttcggtgccatggtgcaaacggtgggcttcgctgaaaacagtcaacatgtgagggcatccgccagtaaaagacagggtctattttgttctggcggcagtgggctttctttgcttttacttacggcactgttaggtttatcgggaatatttacctcattggcgcacgattatgaaaaataaaaccaaacaggtcgttcttgatgataccgatctcgccatcctcgccctgctgcagcaggacgccagtatttccaacgctcagctgagtgagcgcctgtccctgagcctcacgccctgctggcgccggcgcaaacgcctggaagaagaaggcgtgatcaaggactaccaggccaacctcgaccgcaagatgctcgggctggacatcctggcgttcgtgcatgtgcgttttgcgatccacaccgaccatgcgcccgacgccttcgaggcggtggtgaaagaactgccacaggtgttgtcgtgccacaagatcaccggggatgccgattatttgttgcaggtactggctgaagacctggacagctacagcgagtttgtcgagagcgtgttgcggcggcagttggggattgcctcgatacagtcgagcctggcgctgagggaggtcaaggcgaccagtcgagtggcgattccacagcgcgaataaccgcgcttttcgcggggcgatgtggcaaatcgccgccactgagatgtgaaaaattcgttaactgtttctccctcaaggctttttcctacaagaacaatctgccagactaatgcgaataattatcaacagattttttattcgccagggacggcgttcggggagagtcagttccatgtctgtgcaacaacacggcagtaaaggtttttcacccagtctgatagcgttggcggtctgtctggccagttcatccgcggtctttgccgccgatacccaggcgccggccaccacgcttgaactgggcgccacgcaaatctctggcgaagagcaactgggcgaaaccaccgagggcacccagtcctacaccactggcgcgatgaaaaccgcgaccaaactgccattgaccatgcgcgaaaccccgcaggccgtcaccgtgattacgcgtcagcgcatggatgaccaggcgatgaccagcatcaacgatgtggtcaaggccacgccggggttgttcctgaatttctccagcggtccgggccggcagtcctatacgtcgcgcggcttcgacatcgacaacctgatgtatgacggcatccccagtggctataacggtgtgtcagtgggcgcacagccgaacctggcgatgttcgaccgcgttgaaatcgtgcgcggcgccaccggcctggtcaccggcgcgggcaacccttccgccgccatcaacctggtccgcaagcggccactggacgagcagaaagtcaccctgaccggcgccgccggcagctgggacgactaccggggcgaactcgacgcctccagcccactcaacgacagcggcacctggcgcggtcgcgtggtcacctcgtaccgcgatgccaacagcttcatcgacaacgccgaggagtatcacggcctgttttacgccgtcaccgaagccgacctgagcgaagacaccaccctgacccttggcttctccaaccaaaaggacaagaccaattacttctggggctcgtcgatggtcggccaggatggccatcacctgaacctgccgcgctcctacaaccccggcaccgactgggaaaacaaggaccaggagatcaacaccgtattcgccgagctacgtcagcaactggccaacgactggaaactgcaagtcaacgccaactatgccgaacagaacgcgctgttctccggctcctaccagtcgcgctgggtcgccaacacactggcgcgcaccgtctatcaagcggcctacgatgaaaaccaggcgggtgtcgacgcgtttgccagcggccccttccaggcgttcgggcgtacccacgagctggtggtaggcgccagccggcgcatctacgacatgaccacccacaactacagcccctacaacctgaactggccgctcacggcgggcaaaccgaacttcgtccacaccaccaatgaccgcgacgtgaccacccaggacggggtgtacgtcaccacgcgcctgaatctggctgacccgttgaagctgatcctcggcgggcgcctggactggtatgactacgatgcccacggcagcaacaccggcgactacaaggtcacccgcaacctcacccgctacgccggcctgatctacgacctggacgaccatcactcggtctacgtcagctacagcgacatcttcacgccccagagcgaaaaggacacctccggcaccccgctcaagcctatcgtcggcaagaactatgaggtgggtatcaagggtgaatacctgggtggcgcgctgaacgcgagcgtggcgctgtttcgcgtcgaccaggaaaaccgtgccgtcggcgtgaccgtcgcaaactgcccgcaggcctcctgctccgtggcctccggcgagattcgcagccagggtatcgacttcgaactgcaaggcgccttgaccgagaactggcaggtcggcggtggctacacttatgcacgtacgcacaccatcaaggacgcagccaacccgcagaacgtcaacaagcagttcgacaccgacaccccggagcacctgttcaagctgaccaccaactaccacttccagggctcgctggaaaaactccgcgtgggcggcaacgtgtcctggcagagccgcatgtacaacgacttcaaagtcgcggatggcagcacctaccgcctgcagcaaggcgcctatgccgtcaccgacctgatggccggctaccaggtcaaccagcacctggacctgcagctcaacgccaacaacatcttcgaccgccgttactaccagtccatctccaattccgtgagctatggcggtgattcctatggcagcccgcgcaatatgatgctgacggcaaagtacagcttctgattcacggcggcgccctcctcaaagggcgtcgcacagcgaaccagaacccgaatgccgacctccgcgagcatgaaaatgcgctatgttatcgggctcataccttcaagattgataccatgcacatcacacgcttcgacatcctcccgtacctgacatccacccttggccttgaaaaaaacgagatgagcgacctgggctcgctcgtggtcctggtcggtgaaaatggttgcgggaagtcgcggctgctcgaggcggtcgactggctgctgcgtcgcacacaccaggttgggtacgctcaattgctcaagatcgacgcaggccgggcaaaacaaaagcgccactccgacgctatgctactgggagccgaagaccacatctcatgctcagccgctgcgtcggattgcgaagcgttcgataaggtacttgtgcctcttgactgtttgaacttcagcagtacgggcgacgaagacatcgatgtggcactgtccgcctattgcgcactgtccgacatactgcgcaacccgacgatttcaaaaggggggcacttcacgcgtctgtcggtcggcgcgccgcgcggcgatggcctgacggattcactacttgctggaactccactcgcttacatcgatgacgtctgcgtgcgtcaggctgcggcctcctccgacgaatcgatagggatgtacagcccaaaccgcatgattgaggacgactacgctcgcctgaaagaagtgctcaacgaaatcactggcatgcacttggatgtcattggcgaaaatgcctgcatcggcggtcagcgtattgatcgtacgacgttttctgacgggcagatggcgttgctgcgtattgcagtgctgatccattctcaggtgctgaaggacgttgaactgccgatcctgcttgatgagccggagcgtcatctgcacccttcgcgactcatcggactgatcgacgccctccgtaagcacctgccccgcgcacaattgtggattgcgacccacaatcttgcgctgacagcgcatctggcggccatagagccacgcgcaatctggttcggttcgaaggggctattcgagcgcgccggcctagcgcaggaaaaggtcatcaacggccttctgggaggggcaaccggcgcccaacagatcagcgatttctgcacgcgcgcggaccagttcgcggcatgctcgttctctgcggactgcctctatccacccgataccgtcacctataaaaaagatgatccgcaaatccagcagatccgcgacttcatcaccggagggcgtactcgtcccatggtcatcgtcgacattggtgccggacaggcgcgtttactcgacggtttggctcatttgctcaatgactctttgctaaaggacgtctcttactatgccatcgagccgaacgacgccacgcgggcattgtgtgctgaaagggtcagtcggcacttcaacgacgggagtgtacgcgtgttcgccagcgcaaaagatctcctcgcatccggccctatcaaagccgacgtcgcggtgctggcgaacgtgctgcacgagattgagctcaagtactggaaagcggtgttgctcgatgcgcacacgctcctgaaggacgatggatcgttgctcatcgtcgaggacacacggctgccgcgcggagagctggcccacccgcacggctttcttatcctcgagaccgacgccctgtgcgaactcttcgcaacctgcaaggacgcacacggcgttcagcacattgccgcgacacgcggtggcgcccgactacaagccaccgcgttcaaacgaccgctactggcggcgttgactacctcatccatccggagcgccttgcacctgcaaaaaagtagcgcggcagccagcattcgcgaattgcgtaagtctggccggcaacctgactaccgtctcggtcaagaacatgcctaccacacgcaactgcttgccaacctcacgctcgcccttgaagacttggcattaggtcgctgagccacaccgaaatgaacgcccgaatcctggagacgggcgttcaatgcacattaggatgaggcctgtacctcatctggcccaattcctgcctccctccatcccaccaagtcgctgctgactacgcggacgactcttttgagccccgccgcccaagcgcctgcgccgataatcggtcatcccccagctatcccgaggccttccccccatgacgagcccctccaccgaacaggtcagtccgcaaaccctgcgcaaggtcatcatcgccgccggcatcggtaatttcgtcgagtggtttgacttcgccgtctatggcttcctcgccactactatcgcccagcaattcttccccagcggtgatgccagtgcagccttgctcaagaccttcgccgtgtttgccgtggccttcgccttccggcccctgggcggtattttcttcggcatgctcggcgaccgcatcggccgcaagcgcaccctggccatgaccatcctgttgatggccgctgccaccacgttgatcggcctgctgcccacctacgccgccatcggcgtcacggcgccgattctgctgtcgctgatccgctgtgcccagggcttctccgccggcggtgaatacgccggcgcgtgtgcctatctgatggagcacgcccccagtgacaaacgcgcctggtatggcagctttgtaccggtgtcgacgttttccgcgttcgccgccgccgcggtagtggcgtatgcccttgaagcgtcgttgtccgccgaagccatgggcagttggggctggcgcctgccgttcctgatcgctgcgccactcggcctggtgggcctctacctgcgctggaagctggacgagacgcctgccttccaggccgtgaagcaagagcacgcagtggctcactcgccgctcaaggaaactctgcgcaaccatggtgcggcgatctgttgcctgggcgcttttgtgtcactgacggcgttgtcgttttatatgttcaccacctatttcgcgacgtacctgcaagtggcgggcgggctgaatcgggcgatggcgctgctggtgtcgctgatcgcgttgatcttcgcggcggcgatctgcccgctggcggggctgtattcggaccgggtcgggcggcgtgtcaccgtgatgactgcctgtgtgttgttgatcgtggtggtgtatccgtcgttcctgatggccagctccggctcgtttgcggcgtcgattgtcggcgtgatgttgctggcggtcggcgcggtgttgtgcggcgtggtcacggcagccttgctgtcggagacctttcccacacgcacgcgctacaccgcttcggcgatcacctacaacatggcatatacgatcttcggcggcactgcgccgctggtggcgacctggttgatcagcaccaccggcagcaacctgtcgccggcgttttacctgattgccgtggcgttgctggcactggccggagggttggcgttgccggagacgtcgcggatttccttgcacgacgtgggtggtgaggaaacaagcactgcacctttgctttcacggtaaacggcaggagggtgaacgccgctggacgcaggtagaatcaattagacacctgcctgctgccgcatccagaccatggacagcgttttctgaaggcgccgcagtgaaccctgtggtgcgcatcggctaaatcgccgcagccatgcgcgctctagaaccccaggcaaacgtcacgaccatcagcaaccccaagcccgccatcgccgcgccggccagggaaatcgccgggtagcccaaccctgcgttgatcactgcaccccccactgctgcgccaatcgcgttgccgaagttgaaggcgccgatgttcacggccgaggccaggttcggcgcatctttggccgcttccatcacacgcatctgcaacggcggcacgacggcgaagctggcgataccccagatgaggatgctcaccgctgccggtatcggccaacgcatcaggaatgcaaaggccagcaggaccagaatcagtgcgctcagcgagacgatcagggtccggtcgatcgagcgatctgccgccttgccaccccatatattgcccagggtcaacccgacgccgaacagcaccagcatggccgtgataaagggggtagacgcatgggtctggttgctcaggatcggcgcgatgtaggtaaacacggtgaacatggcaccggaacccaccacggtcagggccagtgccgccagtaccgaaccacgccccagcaccttgatttcggccagcacaccgtcgcttttcggcagcggcaggtcaggcagcgcgaaccacagcgcgaccatggtcaccaggcccagcccgccaatgccccagaacgctgtacgccagccaagcagttcacccaaccaggtcgccagtggcacgccaccaatagtcgccagggtcaggcccataaacatcgcggcgacggcgccggcgcgcttgtccggcgcaaccacactggccgcaacgatggaacccacaccaaaaaacgcgccgtggttgagcgaagtgatgacgcgggcaatcaacaggtcgtaatagccggttgcaagcgccgacatcacgttacccagggtgaaaatggccataagcccgaccagcaagtgacgacggggaatcttgccagtggtcaggatcatcagtggcgcaccgagcaatacccccagggcgtaggcgctgaccaacagccccgcagtgggaatcgaaacgccaaggtcattggcgatggtgggcaacatgcccatgggcgcgaactcagtgacgccaatgccaaaggcaccgacagccagggctacaaggggtggattgatacgcatggaagactcctcatttatgccgcaaatgctacgatcaacgctttaacggcactagaccgtttaattggcaatcacctttgcgcgcgaggcaaaaatggatttcaacggcaggtcgggtgagatggcggtattcgcaatggtggcgcaggaaggcagcctgtcggccgcagcgcgggcattacgcttgacgccctcggccgtcagccgcgtcatcgcacgcacagaacaacgcctgggcacccgcctgttgattcgcacgacccgcgccctcgccttcacagccgaaggcgaggcgtacctgcgcggcgcccggcgcatcctggccgacatggcggaagtcgaagaagccatcgccgaccagggcgcgcccaaaggccggctacgggtcagtgcggccctgggccacggccgcatggccatcgtgccgttggtggcggcgttcagcgcccgctacccaaacattgtggtggacctgaccttgggcgacgaagtggtcgatatcctcggcggccaggctgacatcgcgatccgctttggcgacctgccagacagcccgctgaccgcgcggcgcatcggcgacactggccaggtcctggtggcgtcgccggagtacctcgcgcaacacggtacacctctggaacccaacgacttgctgcgccacaactgcctgcgcttcaacttccgccgcgcccaatccgactggcccttcgcccgtgacggtagggagttttccctgaagataaacggcaatatcgaatgcagcagtggcgaagccctcgctcaactggcgcgattaggcgccggtattgcacgtatcggcgagttcacggttgcacaagacctgcaacgcggtgacctggtgcgcctgctggaatcctggaaccccggcgaccgggagccgatccacgtggtgtttgtcggcggcgcgagcatgccggcgcggatccgcgtgtttgtggactttttgctggagcatcaccggctataaacgcgcaggcttgtgcagccgctcaagcacctcgtcagctgcctcgcgccatgcctgcgtcgcgcctttgttcctcaacaccgccaacccagccgccgtaaaggtgcccggtgtcgcaatcgcgctacccaacgcttccagactcgcggatggctggtggcgggcactggccagacagtcttgcaggttgcccatcaccagttgggcggcctggtccttggacaggcctttgtcggtaaaccactgctgaagatcgctcaggaagaaatagaaccagccgttcatgcaggccgcaacagtggccagttcgaacgcctcttcctcgtccaatacaaccaatgaaccgagcgcgcccagcagcgttgcatggggttcgccaccgggcgtgaccaccacggtcgtctggttgatctgcgcggcgtaggacagcatggcgcgcaccacacgcgcttgcgggaagcggcgctgcaactcggccagcttcaatcctgccaccaacgacaccagcgattgctcaggtctgagctgcacttcattcgaaagctgatcgaccacctccgggcgcacgcccaggaccaacaagtccgccccatcgaccacctgttgattgtcagccatcacctcacagtcccactgttcagcgagttgctgcgcacgttggtggttacgcggagacagcagcacccgcccgccaaacccgctgcgccgcaggccgatcaccaccttttccgtcagctcaccgacgcccaggattccaatcttcagcacgctgtccactccggtcagttctgtagtcgggtgcatcatagacatgattcccgtcttcatgcaggcggacgttcacgctacactcgccgctcgaaaagatcagccaggaaggcaagcatgagcactcaaggtaaagaccggcaaatcgacaacatcgaattcaacgtcagcgatattgcccgcagcaaagccttctacggcggcgcgttcagttggacgtttgtcgactacggccccacctacacggggttcagcgatgggcgcctgacaggcgggttcaccacgggggagcctgttcggccaggtgggcctctggtcattttgtacgccgatgacctcaatgccacgcagcagcggcttaaagccctgggggctgtcattacccgcgagacgtttgcgtttcccggtggacgcagattccacttcacagacccggatggctatgaactggcagtttggaacgccggtcaataggcctcgacccgacgcctaggcgaaggcatcaatcgctctccctcaagccctaccctcacaggatatgaaggttacccatgcgttttctctttcccctggccctcagcctgacgcttatcggctgcgccaccactaaaaccgacgttcgcaacgaagcccaaatcagccaatacgacccggccaactcagcccgaatccggtttattacgggtgacaccaccaacgcgggtttcctcagcggccagacgtgcgagatgttttacaacaagtccctgctgacccaaacacccgaagaagccgggtggcaaaaagcccatgtcgactcggcggggctctacccgttcagggccactgacagccagaacagcgtgattggtatgcctgccagcaaggcgagcaaagccatcaaccaatcgcccaaagtgtttgacgagcatgtcattccagcgggtaaaccctttattgcagggttcgccatgggcggttcgcaaatgtcctgctttcccgcgcctgtcacgcttattcccgagcccggcaaagactatgaaatggaatttcagctggtcaaaatcagcacgttcaaggccggttgcgtgattgccgttcgccaactctctgttcaggacaacaacacggttgaaacaccgctaaggccgcaggtgtgtgccaaaacgccgtcgggttggtacaccgtcaccccgaaaccttcgccctgaaatgcctgggcaggacgccatagtcatcctgcttatcggacatcgcccagacctgggacccggcttgtattggaggaaaaatgcggatctacatcacaggtgcatcgtgcgcgggcgtcaccacactgggtcaccacctcgccacgcggctgggtatacgacgagtcgacgtcgatgacttttactggatgcccacaaacccgcctttcacaaccaagcgacctcccagcgaccgcgttgccctgatgcaacaagcactcggtgacgacgactgggtgctgagtggttcctgcatgatctggggcgatgcgttgatcgccgatgccgacctgattgtctttgtggtcacacccacgcccgttcgcctcgaacggttgacggcccgcgaaaaggcccgctttggcgatcggatcgcacccggtggtgatatgcatgcgatacacgtggccttccgggaatgggcttcgcactacgacgaccccgatttctcggggcgcaaccgtgggtggcatgaggagtggttatcacacatggcggccccgatcttacggatcgacggggctgacagtgttgaagcaatggttacggcagtcgttcattgggtatcgaaaatgtcgcaatagctggaaaccgtaacagacgaggcagctcaactgcctcgactgttctatttctatccgcccgtttcgcgatgccacaactgtcaattgtattttttgtagcatatatctatggcttgctgataaagcacctgacacgtgtcgtgggtgaataccccatttgaaatacaagcagagtgccgttgacttgcgcgatccgtacaaaccgacagaggcgttggtatatcggcgacttcctcagtaacgccatgtgattttgctgaattcacagggctcatagatttgttgagtgcttgaggtatctgttcaatcgtggggctttgaaagctactcgccaaaaagagaacgattgaagctgcttgccgcgcaggagaattggctggccaaagcttgaaatccaggagtacatcaccttgcttaagcgcgccatctttggtccaacgaataggtactcctgagccattttcgagggtacctttcgagtcgatgctaaccattggcgccccggctgagtcctccaaaatggacgtagcgcgcaagaccgccaacaaccttcctgaggtatcaacgactcgcccatcctggcttatcgttcccaaggctgttcgcacgtatttgaaaccttctgttttttcgtactcagtaatctccccttttttgtcgaccaatatgaaaaacataccgtgcttatctccaaccttgaaaggatggatctgaacgaccggtggggcgaacgatttgttatcgcaaccatgcgggccgggatcacactcaggaggtcttgcaaagcagaaaccacttgcaaacatcaacaagctcattgcgattgcggtgagcgttttcatgtgaaaattccttttaagcactgcgtaccggacgattaagtgtgttggccacgcggagaggtccagctttgccagacgcctcgttgtagtcgacaactcagctttacatcttcgataaggcgaattgaacaatagacgacgttggttgacgctgacgcgaatttttcatggtttcctatttcggtatatcgacgctgagagtctcaatctgcacacgtcaaccgcctgatacattgcgggcccaacgcaccggtcgtccaagcgtcgctactccccttatcctcacccctacccgcccccgcgaacccggagccgccatggacctcgccaccctcgcccttttcctccccgcctgcttcgccctgaacatggcgccgggcccgaacaatttgctctccgtgagcaattccacacgctacggctatcatctcctgtttggcgggcatcggccgcttgctggcctttgccggcatgatcgccctcgcatccgccgggttggcggtggtgctgcaaacgtcggagttgttgttctatgggatcaagattctgggggcggcgtatctgttttatctggcgtttcagttgtggcgggctaatccggaggcggaggcagattcggccacagagaaggtgggattgtgggcgttggcacgacaggagtttttggtgaccgcgggcaagcctcatgatcggtaatatgaaatctacacgcaggcatatatcggtcatttggtattaataaaagcagggatgaatctttggatattaaagagttttgcctcgctcatggattcgatatgagcaaatgtggggtagcgttgggcggtggtagtttcgaaatgactgagttgaaaatctcaccagtcgaatttctgaccttagcggaggatgattttgaacggggcggtttggcggctcttgtcaatgctacgaccaatgcaaaacgagctattgtctctcagcttgatcagttattgatctcttttggctatccttcatttcgattgaaggtgccaaagaagatcgaacggctaaaggcgctcgggttattggcgccaagtctgttgcgtaaagtcgtcgatatgcgaaatattcttgagcacgagtacacaacgcctgggcttaaaaatgttgaagaggcgttggatatcgcgagcctatttgtgatgtccgcttcagccatgttcattccattcgatgatgtcttggagttctcactccctgacctctttgtgacagagaacgctgtcactcacttttcggcgggactgaatcgtgagactgatagagttttctacactgtctacgcttataaatctggaagccatggacggagttgcgtcggtcagtgtgagattcaatcagggcatgtcctgttcgaggcgatggtgcagctttccgcgtcgctgatgcttcgctacaaggtgaaccaagctctcggcaattttgaagcggcgtatgcccagctataagtactcatttaattaatgttgtggctgtaaacggctgtaacccaccgaaaagggcgcgtccaagctggtggcatcaagcaacgttcaagcaaatctgctgatgggcaatatcacgtctcgtgaaagactcgatatctctacaaacccagcgaaattaaggtaagttcagaaaaccttttctcgaatctacggagcggataatggcgaatggaaacggagagttaagtcaggatttacacgcgcaaataaagaaattcagcggtgacggagatctgctggctgagtcaggccgctttgaagaagcgctagcccaatataacaatgcatgggcattgatcccctcccccaaaaatgattgggaggctgcaacctggatcctggcagctatcgctgacgcttgcttcctatctggatttaccacctcagcacgtgaggctttgcagtacgcaatgacgtgccctggtggtcttgggaacccttttttgcatctgcgccttggacaagttttacttgatgacgcacaaaatgaccgcgcagcagaagaactgatgcgtgcatacatgggggctggcccagagattttcgctgcagaggacgcccattacctgaactttctcaagacgcgtgctgatctttgacaataccgtaaccatgagctcctgcgtttacattcaagctactcagccccctaacgtgaatgcattgggtcgattaaagtcgtgcggtaggcaagccattcaagctagtcaccagcaagcccgataatgggcaatatgaaaccttctgtcaggctgctaccggccagaaccggttacctgtgcacgattgatgctctgtgtccgtcaacagcatctattcgatactaaccactctcgtagaatctaaatggccaccaaacgccctcaaatcaaaacctccgctgacattaacgagctgctgcttcactctaaggcgccgcggccactgacccctgagcagatggcggagctagagcgcatttcgaattacgatgtctctacctactcggagggagacgtccgagcggagatcattgaccccgtcatccgagtcctgggctatgccaaagagacctatttctccacgcagcgagaaaagcacctgaaggttggcgacggggacttgttcatcgactatcgaatgactttgtggtcgcaggccttttggatcatcgaagctaagaaggttaaacgcaagcagctgaaatttagctccgcagaactgcaacaggcacttctgtatgcggtgcatccggaaatcgacgctgctctcgttgtgctatgtgacggacgagtctttgaggtgtacgaccgcgatgagagtgtcacccagccagtcgcgcgcgtggaggtcaaaaagctaccggagcagttccacgtgcttcaggctctactcggtccgtggcaggcttggttcttccagaagcgccgcgcgctcaagctggccagccgtgtcctacagctggagatgacgcctggccgaattgaggagttttcggatgcaatgcagcggcgggtgcaggacgcgcgtgcgaaggtgtacgacaattggcgcaaggtaaagccctcaactgacaaagatgcgcgatggctcaactcgctggaacaggcatctatcggagatattgtcgcgaccgagttcttttcgggccagacagcgcaccgtctgggggttgtcgccaagtcgttggtggaaaaggcgaagccaggcgcgttcgaattgatgtacgcaatgtttccggaccatccaggaaacttgaacgacaactatgtggcacaggctttacgaactctcatcgagttcggcaagtcgggacgtgaggtcagttggatgcctgcttggcttggtgtccaacagcccggtgtcaatctggaggcgccgatcaagaaacttatcgcgctctcacttacgacctttctagctgcgccagatttcagggctgtacttcagttttcggcctgcgcgcgaaggctgtcgaaggtttcgatggcgctcaacccgacgttatcgaagttggggcatatccaacaccagcaggtgcgccatttttttgatgaactccactatgcgcagttcatgtcgacgcccgaagggcataacctccggcagctcgatgtgcgcgcatatctgctcaccgaacgattcgtccatgagtgcaccggcaagcagcagtttcgtggctgcttcaacctgaaccgggcacatacgctcctgattgactcatggaatgttgagcgtctgctgctcggcgacggcgccgactactggaggtgcctggacggcagaggaattgggggagaggttcatccgacggagcacaactgggtcgactacgactcgttgggtcacatcgcgctatgcgtgttgaaagacatccctgattggcgcgagtacgtacttgccaatcacggcgacgacgtccagcgaattgcggcctgcggttcgtgggcagctcgtgagattttggggattgcacgagatacgcagttaccgcatgtgccggatactgagagcgccaagcggttcttcgatggcgacgtctcgctcttcacggcgcttcgggacgcttactgcaatcgggggccggagagttgagtagcaaagcttcggccgtccccgctcctcttacaaccttccagttgccccccaaacccaatgacgcttatagtccgccccgtcgcccacatggcgatcaggtttggcgacctgactatcggatgcaaaagcactgcgctttttgtagaggctgttgcacgcctgcaaagctgtcttaatggcggctgtgcgcgggagaccttcgggtctgccgggttttccgataccggttcgccaacctgcgtacagctgtcaccctatcgtttggcgacgactgagtggcggtcaactactgcacttatcggagttttcaagatggaacgatacatccctctgactggaatcgatctggttcccgcctctttgctcattgattcagaagcgccgctcgatgtgctgcaagcgatggcggattaccgcatccgcaccgtgactcaagtactggaaaacattgcctttcgcagcgagttggaaacagattccgtagtgctttctgactttgcacaattgctggcaatccctttgcgtgacggctgcgacctgatggacatcatcggtcaacggctgcgcgccgaggtttcaacccccaaagaagcacctgcaagccagagctaagctgagccgcgcgcgttggtgtcgtcttagacccaacgcgcgcattgtccaaccgccccgctccccttatcctcacacctccccgcccccgcgaacccggagccgccatggacctcgccaccctcgcccttttcctccccgcctgcttcgccctgaacatggcgccgggcccgaacaacctgctgtccgtgagcaactccacccgctacggctaccgcacgtcatgcctggcgggcattggccgcctgctggccttcgccggcatgatcgccctcgcctccgcagggttggcagtggtgctgcaaacgtcggagttgttgttctacgggatcaagattctgggggcagcgtatctgttttatctggcgtttcagttgtggcgggctaatccggaagcggaggctgagtccgcgacggccaaggtgggattgtgggcgttggcgcggcaggagtttttggtggcagcgggtaatccgaaggcgatcttgatcttcaccgccttcctgccgcaattcgtggtgcccggggagccgatcaccccgcaattcgcgctgttgggcgcgatgttcctggtgctggagtggattgccatcagcgcctatgcctatatgggcctgcatatgcgccgctggtttgccgagccacggggcaagcggatcttcaatcgctgctgcgccgggttgttgtcggcggcggcgtcagtgttgttgatggcgcgcagggcttgaatggaagaaagctaattttgcaaatcgaatcttggctgcacgcacaagcatccacggtcttggagacctaaatatccgtttactaagtcgtgccagtaatattttacgcgccatgcattgcctaatgtattttaccttcctcagaaactgccagactgaaatcagtcaatataaaaagacttcccgacgagaacaaccatgagcaaaaatcatttcatcaagatgtttgaagcaaaatttaactatttatggagccttttcatcgccactgacacaataaagcataatggggaaaaagggagcctaagagaggcatttgtaaggcagattatagaatcacttctgccacaccacttcgccatagggagcggtatcatcaccgacttcaacggaaaagagagttcacaggcagacataataatttacgacaaaagattgatcccacccatattccaagatatcggccgtggaatttacccaattgattccgtactaagggtcttggaaataaagagcaacctagacaaaaagtcattaatccaaattaaagacgcttcttggaaattaaacccatcaaacccagacggattgaaaattgcaaacagcggaaatttaccaggtggacagatgaactatccgctatatggtgtttttgcatacaaatgcagtatctccaatttaaataaaacgcttagcagtcttggagcggcaacgccttttcccaccatggcgatattaggcaaaggtgtttgcctcaataaatcaaatacacttactaccgttgaaagcaactcggagctgactcgcttctttatgagcttgtacttagagtgcattgaagaagaagcagcctcacgccaccacttcggcctaataagctggctggggaaaagctttttcactatgcagcccacggctacatagcccacacaatcccccccctaaacctccgaagatttttaaaaacatagaagatagcgttcgaaaagttatacgcgaatacggataattttttactatttgaaatagcatgtgcgtttcatgcaagtttcaatactattttttaaaccaattactctaccgccctttctaggagagatgtcatgaaaaccatcgtggtcggtgcaagcaaagggttgggcaaagccctgatcgaagggctcggcgagccgggggatacgctgatcggtgtgtctcgctcccgcccggaacagctggcccacaaggccggcgtcgaggtgcaatggatcgaagccaacctcgcgaaaccaacccaggcggcgcaaatcattgccgaggcggtggcaggaaacggcctggacacgttgatctacaacctgggcatctgggaagaattcgccttcgacccggcctacaacttcctggccgacgacgatgaccagatcgaagccatcgtcacctgcaacatcacctccaccctgctgctgatcaagcgcctgttgccggtgctgctcaagagcccccaccccaggatcattcttaccggctccacctccggcctgccgcaaagtggtcggccggaagtcgccttcggcgcctccaagttcgccttgcgcgggatcgccgatgccctgcgtgaaggttatcgccggcagcgcctggcggtaacctgcctgaacctgggttatctcaacaccgaagatcccttgagcaccccacgtgcacaggccgagcaaagggatgaaggccattcgattcccgtgcacgatgtggtgcaggtggtacgcatggcgctgagcctgtcttcggccagcttcgtcaaggaaatcaccttgccggcgatactggacgagcgcttttaacaccgggagagcacggcatgacccgcgatgaactcgccaccttctaccaaggctatatcgactgcctcaaccgccaggactgggaccacctgggtcatttcgtgcacccgaacgtgacctacaacggcgaagtcgtcggcctcaccggctaccgagccatgctggagcgggattttcgcgagataccggacctggtgttccgcatccagctgctggtggccgatccgccgaccgtggccagtcgcctgaacttcaaggtcacgcccaggggcgagttcttcgggttgccgatcaatgggcgccaggtgaggttcgacgaaaatgtgatctatgagctggtcgacggcacattcgcccacgtctggtcggtaatcgacaaagcggccatcgcgcaacaactgggcgactagactccacagacccattctcacgtggagaccgatcatgacccacaaaaacaccctttgcctctggtacaacggcacagcccttgaggctgcgaccttctatgcccagacctttccggacagccgggtgaatgccgtgcacctggcgcccggcgattacccgtcgggcaaacagggcgacgtattgaccgtggactttaccgtcttgggcatcccctgtatcggcctcaacggcgggccgatcttcccacataccgaggcgttttcgtttcaggtggccactgatgaccaggccgagacggatcgttactggaacgccatcgtcggtaacggtggccaggaaagcgactgcggctggtgcaaggacaagtggggggtatcgtggcagatcagcccacgcgtgctgacggacgcggtgacccaccccgaccctgcgacggccaagcgcgcgtttgacgcgatgatgaccatgagaaagatcgacatcgccgcgattgaggcggcgatagcggcggactaaggcagagcatccagcatggcgttggccgccagggcatggaccttgcgggtggggtgccattcgtcccagtaataatgcgcgtcggggttggcacacatcggtttagcctccgggtaagtagcctggcatggcgtgtcgaggtcggtgaaaccatgggccgccggattggcgcgcaatgcgtcgctgaaagccaggtggtcgaagtagctgacctttgccgtgccgatctgcgccagcacggccgggagtttctgcgcgagcaactgctggtattttttcgcgttggcgacttggttgccctggaccaccgcaggcacatggctgaggtctgtggtgcccaccaccatcacatgccgggcacccgctgccaccagttgctcagtggctttgcgaatattcgtcaggctcgattcgctcagtgcctcaagggtttccgtgtgggagaagtcggcccactcgaaaaagtcattggccgagatgaagatgaagtacagcgccttggggtcggcgttgtgggacttggcagcctgcaagtgctcggcgatctgccctaggacaccggtgtcctgggagggcatcatccaggtgtagtaattgccgtggccacttttggcgccccccaccgcgtagtcggtcagcggtgtgcgcagggcctgagccaggccttcgacggcggtcgagccgttgctccagcgccccctccagtacagcggcccaggcaacacctgggcctccttgatcttctgtgcagcgagccgtgtggtgagcgcttcgcccgcgccgttgtcggagtagctgtcaccaaaggcatacacgtgatcataggtcgaggcgccgaaggcggttgaagcggacagggtcagcagagcagccaaacacgcacgtcggatcatcgcgtttctcccggaatgtctgcacagactaccggttggcgggagccatgctggaaccattgcgacccgtacatatccagcggcggctatacagcggccatcctgctggttaggcttggcacctgcaacatccagttaaagttccagcgtcacccgccgtcacccttaaatccccgaatggactcaacgaggctctcgtgcgttttatcactccccttttgctgatcggtggcatcgccaccctggccggttgtgccacccagaaaacccaagtcgaaaccatgctggccggcgccctggcccagcccctggttgaaaacagtatcgtgcgcgaaggcgacgtgctcagcttcgaactgttgatgcctggcgatccaggcgctctgcgccgcacgttgcaagtcgaggccgcctgttcttcgccgcaactgcacttgctgtatctggacggttcgcaacgggtctaccccgccagtgccggtcgctacagttcgccccgcagcttgtcgccgcagttgcgtgcaaccctagccgccaaccagaccttcgtccgcgcctgtgccgaaacacccaagccggactggcgcctggtacagaccaacgagcgcgacaaccaggtgctgatcgacgccaacagtatcaagagcgtcaacggcgaaacgcgcttctgggccgccttcgataacccgacggtgctcaacgacctgccctacaacgccccctatgcgcaaaaacgcgagcactttgcggtgtcgtgcacaggcggcacctacaagcagttggccggctacgacatggacgccaacaaccgcgtcagcgacggccgggtcgacagtttccccacgccgcagaacatcgctggcagcaatgccgactacgaattgctgttcaacaaagtctgcgtcagcccggaaaagatcgctgcactgcccgcgttcaagccgcgcatgaaagcgccggccaccattgccctgacctcggtgcagccggcggtgctggcggccatcgcccagttgaacctggacaaacccacccgctcgttcaaatacgtccagttcgcgggcaccagcaactaccgtggcaagaccagcgataaccaaagcacgcagttcatcagccaggacgcgccgagcgggcaactggccctggccacccgtggcgacggctatgagagccaggccgtgagctggcgcaacctgttccacctggtgtcgaaagccacctacggcggttcgggcatggcggaaagctcgaccctgacccaactgagcttcaccggtaactggaaggcgctgcccgtgggcgagaccgtcacctacaccaccgcacgctccagcctcaacagcctgatcggcagcagcaccaacacgcagaccaaccgctgccaggtcgagcgtgaactgccggccagcgaactcaacgcgaaactggcgggcagcgccaaggcgttgtcctgccgcaccgacgacgacaagtacaagcgcgtcagccacctgtacttcctgaccgactacgcttacttctttgaatcgagcaccgacaagaacgagtttttctactccgactcgcgtatcgataaattcgaataaggcccgttgacacactctgcaatattccatgaagatggaggccttgttcagggtgtgtcagcttatgtccgcaatgccttccgttaaccgttccgtcattggcttgattgccaaggcgcaaggttgcgttgcgcacgccctcaaatcgaagaaacagtcgctcatgtgaccggggcgcgctgtcccgtcagatgagctgacaggacattgagcgcgacggtctactctcccttgcaccattccctctgcccttctgacggtgactcaagcggtcaatcatcaggagaaagtgcatgtcatcgtttcaaggtatctgggttcccgtggtcacgccgttccatgacggcgccatcgactttatcggcctgcgccggctggtcaaccacctgctggaaaagcatgtggccgggatcatggtgtgcaccaccaccggcgaagccgcgtcgctgagccgcgccgaacaactggcggtgctggatgcggtgttgcagctggtgccagcgcaccgcgtggtgatgggcctggcgggcaacaatcagattgagctgctggacttccagcgtgacatcctgcaacgcccggtggccggtctgctggtgccggcgccgagttacatccgcccgtcccaggccggcctggaagccttcttccgcaccgtggcggatgcctccagcgtgccgatcattctgtacgacattccctaccgcaccggcgccacgtttgagcaggccaccttgctcaacatcgtggcccacgaacgcatcgtggcgatcaaggactgtggcggcaacctgggcaataccctcgcgctgctggccagcggtgaagtggatgtgctgtgtggcgaagacctgcagatcttcaacgcgctgtgcctgggcgcgaccggcgcgattgcggcctcggcgcatgtccatacggaacagttcgtagcgctgtgccagcaggtacgcgacaaccaattggccgacgcgcgggcgaccttcatgcagttggtgccgctgatcaacacactgttcatggagcccaacccggcaccggtcaaagccgccctggccctgcaaggcctgatcggcagcgagttgcgcgcaccgatgcaggcggccagtgcggcggttgtcgcacgcttgaagcaggtgcagaacctgcccggctaatgcgccaaaaacagacagccagcggaccgtccggttgcgaccggaccgatcccggcctatcgtcgaacccacgctttgccttttgctgtccaacccatccgtattcaggtgacgacatgcccacgctgccccgccccgccgtgctcgaactgatcggcaacacgccgctggttcgggtcagccggttcgataccggcccttgcacgctgtttctcaaactcgaatcccagaaccccggtggctccatcaaggaccgcatcggcctggccatgatcgacgccgccgaacgcgacgggcgcctgcgccccggtggcaccattatcgaagccaccgccggcaacaccggcctgggcctggcgctggtcggccgggccaagggctaccgggtggtgttggtggtgcccgacaagatgtccacggagaaagtgctgcacctcagggccatgggcgccgaggtgcatatcacccgctccgatgtgggcaaaggccaccccgagtattaccaggacgtggccgcacgcctggccagggatattccggattcgttcttcgccgaccagttcaacaacccggccaaccccctggcccacgaaaccagcaccgcgccggaaatctgggcgcagacccaacatgatgtcgacgcgatcgtcgtcggcgtcggctctgccggtaccctcaccggcctgacgcgcttcttcaagcgcgtacaacccgaactggccatggtgctggccgacccggtaggttcggtgatggccgaatacagccgcagtggcaagatggaaacaccgggctcctgggcggtagaaggcattggcgaggacttcattccgtcgattgccgacctatccagcgtgcgtcatgcctactccatcagcgacgaagaaagtttcgaccatgcccggcagttgctcaaggccgaaggcattctcggtggttcctccaccggcaccctgctcgcggccgccctgcgttactgtcgcgaacagaccgagcccaaacgcgtggtgactttcgtctgcgataccggcacgcgttacctgtcgaaggtctacaacgaccaatggatgaacgacgccggcctgttgcactacaaacactacggtgacctgcgcgacctgattgcgcgacgcttcgaagacggccgcgtgatcagcgtgagccccgacgacaccctgctcaccgcgttccagcgcatgcgcctggccgacgtctcacagttgccagtgctggtggacggccagcaactggtcggtgtgatcgacgaatccgacatcctgctcggcctgcaccaggacgccagccacttcaccctgaacgtcgccagcgccatgaccaccaccctgcaaaccctggcccccagcgccagcctcgcgcaattgcaagcggagctggatcgcggcctggtcgccatcattgccgacgcgtcgggcttccatggcctgatcacccgcgtcgacctgctcaaccacctccggagatcccttgcatgagtcagtctgataaaagtgcgtttgccacccgcgtgatccatgccgggcaatctcccgacccgaccaccggcgcgctgatgccgccgatctacgccaactccacctacctgcaagacagccccggcgtgcacaaaggcttcgactacggccgctcccacaaccccacgcggtttgccctggagcgctgcgtggccgacctcgaaggcggcagtcaggcgtttgcctttgcctccgggctggcggcaatttcgacggtgttggagttgctggatgccggcgcccatatcgtctccggcaatgacctgtacggcggcaccttccgcctgttcgacaaagtgcgccaacgcagcgccgggcaccgtttcagctttgtcgacctgagtgacctgtcggcgtttgaagcaagtttgcaggacgacacgcgcatggtctgggtcgaaactccgagcaacccgctgctgagcctcaccgacctcagcgccattgcgcgcctctgccgggatcgcgggatcatctgcgtggccgacaacaccttcgccagcccgtggatccagcgcccgctggagctgggctttgatgtggtggtgcactccaccaccaaatacctcaacggccattccgatgtgatcggcggcattgccatcgtcggcgacaaccccgaactggccgaacgcctgggctttttgcagaactcggtcggcgccatcgccgggcctttcgacgccttcctcaccctgcgtggcgtgaaaaccctggccctgcgcatggagcgccattgcagcaacgccctcgacctggccacctggctggaacaacagccgcaagtggcgcgggtttactacccaggcctcacctcacacccgcagcatgaactggcgcgcaaacaaatgcgtgggtttggcgggatgatctcgattgacctcaacagcgacctggccggcgccaggcgcttcctggaaaacgtcaagatcttcgccctggccgaaagcctcggcggcgtggaaagcctgatcgaacacccggcgatcatgacccacgccagcatcccggcggcgacgcgggcgcagttggggattggtgatgggttggtacggttgtcggtgggggttgaggatgtggaggatctgcgtgccgatttggctcaagccctggcacatatctgaataggttggctcggtctatgtgatgggcgggctcgctgtggcgaactggcttgttgtggcgagcgggcttgccccgcgttgggnnnnnnnnnnnnnnnnnnnnnnnnnnnnnnnnnnnnnnnnnnnnnnnnnnnnnnnnnnnnnnnnnnnnnnnnnnnncccaacgcggggcaagcccgctcgccacaacaggcccgctcaccacagcaagccagataggcgtcaagccgaggtgaccttggcccgcgccgcatgcagcttcttgtagctgtcgatcaagcgcagatgccggtccaacccttccagcttcatgctggtcggcgtcaggccataaaagcgcacatcgcccttcaccgagccaatcaccgcatccatccgctcatcgccaaacatgcgacggaagttggcttcgtagtcggccagttccaggtcatcgtccagttccatctccagcaccgcattcatcgcctggtagaacaggccacgctcggcggtgttgtcgttgtattgcaggaacatctccacgcactccttggcctcttcatattgctgcaaggccaggaagatcagcagtttcagctccaggatggtcagttggccccaggcggtgttgtcgtcgaactcgatgccgatcagggtggtgatatcggtgtagtcgtccagttcgctttcgatcaggcgctcgaccaacgcctgcaattcttcctcgttgaggcgatgcaggttgagaatatcctcgcggaaaaacagcgccttgttggtgttgtcccagatcaggtcatccaccgggtagatttccgagtagtccggcacgaggatgcggcaggcggtggcgccgaggtgttcgtacacggccatgtacgactctttgcccatgccttcgagaatgccgaacagggtcgcagcttcctgggcattcgagtctgcgccttcgccggtgaagtcccactcgacgaactcgtaatccgactgggcactgaagaagcgccacgacactacgccgctggagtcgatgaagtgctccacgaagttgttcggctcggtcaccgcctggccttcgaaggttggctgcggcagatcgttcagcccttcaaagctgcggccttgcagcagttcggtaaggctgcgctccagtgccacttccaggcttgggtgcgcgccgaaggaggcaaacacgccgccggtgcgcgggttcatcagggtcacgcacatcaccgggaattcgccgcccagggaggcgtctttgaccaacaccgggaagccctgggcttcgaggccctggatgccggcgaggatgccggggtacttggccagcacctcggccggtacgtccggcaaggcgaattcgccttcaatgatttcacgcttcacggcgcgttcgaagatctccgacaggcactgcacctgggcttcggccagggtgttgccggcgctcatgccgttgctgaggtagaggttttcgatcaggttggacgggaagtacaccacttcgccgtccgactggcgtacgaacggcagcgaaacgatgccgcgcgcttcattgccggagttggtgtcgaacaggtgcgaaccacgcagctcgccgtcgcggttgtagaccttgaggcagtaggcatcgaggatttcgctcggcagttcgtcatcagggcctggctggaaccagcgctcatccgggtaatgcacgaacggcgcactggccagttcctcgccccagaactgatcgttgtagaagaagttgcaattgaggcgctcaatgaactcaccgagtgccgacgccagggcgccctctttggtcgcgcccttgccgttggtaaagcacatcggcgaatgcgcatcgcggatatgcaacgaccagacgttgggcacgatattgcgccacgacgcgatctcgatcttcatgcccaagccggcgaggatgccggacatgttggcgatggtctgttccagcggcaggtccttgccggcgatataggtgccgccctcggacgtcgagttcggcatcagcaaggcctgggcgtcggcgtcgaggttctcgacttcttcgatgacgaattcaggcccggcctgcaccactttcttcacggtgcaacggtcgatggaacgcaaaatgccctggcggtccttctcggaaatatccgcgggtaactcgacctggatcttgaagatctggttgtagcggttctccgggtcgacgatgttgttctgcgacaggcgaatatggtcggtggggatattgcgcgtctggcaatacagcttcacgaagtacgccgcgcacagcgccgacgacgccaggaagtaatcgaatggccccggtgccgagccgtcgcctttgtagcgaatgggctggtcggcaatcaccgtgaagtcatcgaacttggcttcaagccggaggttgtcgagaaagttgaccttgatttccatgggggcacaccagaataacggctaaacaaaaatggccgccattatgaggggtttcactgggaagtttcaggcttttgaccagtggctggcgaattgacccatatggattaaccttttcgcagttggcgccgatggactgagggcaaccagggagtagtcggaatgcgcaataaccagcccgtaacacagcgtgagatttccctcgcgccttcgcaaaaactcatttctgccacggatgtccgaggtgtcatcacttactgcaacgacgcctttgtcgacatcagcggctttgaacgcgccgacctgatcggcgcgccgcagaacatcgtgcgccacccggatgtgccgcctgccgtgttcgcgcacatgtggagtgcgctcaagcagggcctaccgtggatgggcatcgtcaagaaccgctcgaaaaacggcgaccactattgggtcaatgcctacgtcaccccgatcttcgatggcagccaggtggtcggtttcgagtcggtgcgggtcaagtccacggccgatgaaatccgccgggcccaggccctctatcaacgtatcagccaaggtaaaccgggcgtgccgcgccaggacgcctggctaccggccgcgatcaattgcgtgccctacgtggccaccgcagtggccggcagcctcgccggtctgttcctcgacgcgccgctggcaattgccgtggccgtcgccgtcgcggtgccagtgggcgtgctctgctcacgctggcgccaaggcagcaccttgcgcctgttgcagggcgttgagccctcgacgtcggacgccttgatcgcgcagatgtacagcgacgccagcggcccgcaggcacgtttggagaccgcgttccaaagccaggccgcgcgcctgaaaacctgcctcacccgcctgcaggacagtgccgaacaactgagcgccctggccgggcagtccgatcagttggccaccgccagctccaagggcctggaccgccagcgcgtcgaaaccgaacaggtctcggccgccgtcaaccagatggccgccaccacccaggaagtcgccagccacgtccagcgcacggcggatgccacccagcaagccaatgtgctgaccgggcgcggccgtgaagtcgcacgggacacccgtgaggccatcgagcgcttgtccagcgtggtcagcgaaaccggcgcgaccgtggcgcaactggcgcgggacagcgacgaaatcggcagcgtggtggacgtgatcaaggcgattgccgaccagaccaacctgctggccctcaacgccgccatcgaagccgcacgtgccggtgagcaagggcgcggctttgccgtggtcgccgatgaagtgcgccaactggcacagcgcacgtcgcagtccaccacccagatccacgcgctgattacccagttgcaggcgtcgtccaacaacgccgtgcaaagcatggaaaacggccaacgccaggcccaggaaggcgtggcctgggtgctcgaagccgaccaggcgctggtgggcatcagcgaggcggtgtcgcatatcaccgacatgaccacccagatcgccgccgccaccgaggaacagagcgcggtggccgaagagatcagccgcaacatcaccaccatcgccgaactggccgaccagacgtcgatccaggcccatcaatccacggacctgagcaaggaactgacgaacactgcgtccacccaatatgcgttggttgagcggttcaaccgctgagccgctgctgaatgcctggctagccggtttgttgtggctagccggtgtcctgtggctatccggtgacctgtggcgagcgggcttgccccgcgttgggctgcgnnnnnnnnnnnnnnnnnnnnnnnnnnnnnnnnnnnnnnnnnnnnnnnnnnnnnnnnnnnnnnnnnnncgcagcccaacgcggggcaagcccgctcgccacaacaagcccgctcgccacaccaatctccttcaccacaacatagtatgctgaggctcacctccacccattcacgaagcccacccatgtccatcacggataacctcctcgccttcaccttcgccgccaccctgctgaccctcacacccggcctcgacacagcactggtgctcaggaccgccacggtcgaaggcaagcgccaggcgctgcaagccacgctgggcatcaacgccggctgcctgctgtggggcgctgcggttgccttcggtctgggcgcactgatcgcggtgtcggaagtcgccttcaacctgctcaagtactgcggcgccgcgtacctggcctggctgggtttgaacatgttgctgcgcccacgccgctcattggccagcgccgaggtgcaggtcaagccggccggcaactggtttatcaaaggcatgctgggcaacgtgctcaaccccaaggtggggattttctacgtgtcgttcctgccgcagttcatccctcagggccagccgttggtgctctggacatttggcctggtcagcatccatgtgctgctcggcctggtgtgggcattggtgttaatcggtgccacgcagccgctgtccgggtttctgcgccgggaaaaggtgatccagtggatggaccgcaccactggaatgatcttcatagtgtttgcagcgcggttggcattcagcaggcgctgatccgtatggacagttcaatgtcatcggcaaacggcaccgacacgtagccgttctccggtgcacgtacgtaggccaggtattcagggcagtaatcggtgttgtccgccaccaccagcgcgccgggacgcaggtgcttttctaccaggcccagcacatcgccatacagcgtcttggcgccgtccagcagcaacaaatccacgctgtccggcaggtccctggccagggtgaccagttcatcgccttcgcggatctggatcaggtcactcaccccgccttcgatgaagtgctcgcgcgccagggcgatcttcgaggcttcgaattcgctgccgatcagcacaccgccgccgttgtcacgcagcgcagcggccaggtgcaaggtggacaggccgaacgacgtgccaaactccacaatcgcccgcgccttgctgctgcgcgccagcatgtagagcagcttgccagtgtcccgcgagaccggcagccacaggtccttgagcagcgaatacagcgccacgtattcggtcttgctgtgcatcagccgatcgcgttcctccttggataccgagttcaccaaggggctggtagcggcgctggcttgggtatacagacgttcgatcagggacgccaaaggcgcagtggtcaggctcgacataattgatttccgtagagtggggactaagatgcgactaattcgtcgcattaaaagtatgcgagtgattcccatccttcgctattcgcattcgccctgcttccggagccctgtatgaccagccgccagaccccacgtatttccacgcgcaaacagccgcaacaggcgcgctccaccgagctggtggcggcgattctcgaagcggctgttcaggttttggccaaggaaggcgccacccgtttcaccaccgcacgggtcgcggaaaaggccggcgttagcgtggggtcggtgtaccagtacttccccaacaaggcggcgattctgttccgattgcagagtgatgagtggcagcagaccacccggatgctgcgcaacattctggagaaatacgacgaagcaccgctggatcgcctgcgcaaactggtgcatgcctttatccagtcggaatgcgaagaagcgcagatgcgtggggcattgaacgatgcggcaccgctctatcgcgatgcgccggaagcgctggaagtccgggcggcaagccgggaaacgttcgacgcattcatgctggagttactgccgcaggtctctgagcagacacgcgcgctggcctgcgacttgattcgcacaacgctcagttcggtgggcaaggatttttcttgcagcccgcgcaccgcgcaagaaatcgctgtgtatgccgaggggatggctgatatgtttcgggcgtatgtgaatgcgcttaaccatccctgaagcgtactgccccggcatctacccgctgcgcaatagatgtccagacctatagcagaactaccgcaccttctgaggcgtcagccagccacacagtcaataacaagtcattgactgagcaatggccatatgatatcaaaccagctcatggatatgacacttataacaataatagggatggagcctacatgcagaaaatcatgagaaaaaccttacctcttttatgcatgttcaccgttgcagttcaactatcaggatgttcacaaaacgttgtcattcaaggagcggagacacttggcaatgatgccagcgcctacttgaagtcggataatggttggtcttggggcgggttagagacaaccgtaatcgccgtctacccaaaaacgggaaaaccgctgttagaacaaaactttttcctggactacagcaagataaaaatcgcccctggcctctatgcagttgctttaagagtcaattatggcaatgccatagcatttcctgtggttagggtcgaggccaaacctggcaagacctatctcttcacagccaagcgcgtgatggacggagtagccatcaaagctgagtataaagaaaccaacaccatcgattaaatccaaggacggaaatatgaggcagagttttgcatttctttttttaatgctgctggccgggataaccgggtgtgtgtctcggaatattccattaatcgaagacgacactgaaacctcaactaaggttcgtttcgtttcaccgcgagagatgggttggattaatctataccccgagacagactgcaacaacggcgccctcgtggtggtcgacaattccgttgataactttatagagtcactgcgcgggcactcgccaaaaagaataggaatgatcgactctccagaccccaactctcaagcagcggcagaatactcgttcaaaggcggtcagactctcaatatcggcgttacccccttccctggacgctgccttggcggtctaagctttcccactgaacccggatcgcaatatgaagttgtcctggtgagcaatacatcgaacgggtgcaaattcaaggtcagtaaactcaccctgctcaatggctctccccatcgggagcccatcaacaaaatagctccactgatttgcaagtaacccgtcaagtgaaccggtccttcttccgtagacgctttcaaaggaccgcttctggccgatttctgcctgttgcagcgggcagcaatctggatctgaatcaacgtacaaggaggcgtgaagtgcgcgacaagcagatctgggaactgacagaaagcgatctgcacgctgttggggtatggtgctttccgatggacgattccgttgaagatgaatgtacagtccgaccttgtgttgaggaagtaggcttggcgatgatcgtgcgagctgagttttgcgctgccgatggcacgctctatcttggatacgtgcactggagtctggatgaacatattggccaccgacaacctacgctgttgctcaatgacggcacagcggtctcgttttgggggggcattgttaaaccctcctgggatgaagcctcggatgaggcgaaacggatttctttccctatcacattcaagtctgaaccattgctcgggctcacgccgatggttggctgcctagaagggacgtattacctagatagcaatgaccagatttcttgcctttcgataggtgaaaggtgaggacaatagctactctaatctgactttcaccagtgcctgaatgcggcaaataaaacgacgcgtgtcgatcggttctggccgttttcagcccatcactccagattgcgcagaatcaagcgacattggaaatgccccttttctagtgtgttctcaacgcattcgccagccgcaccatcgccgtttcgatctcatgagcagtcaaggacgcataccccaacagccaaccctgtgtcttcttatcgccagcgtacaaccggctcagcccagaaagctgcacattcgcgctcgccgcctggcgaatggttttttcttccgaccaaccctcggcaagcagacaagggatctgcagcccgccttgggggcgcagcgcggtgactatcccatccaggtgcttgccaatcgcatcgagtgtggcggttcggcgtgcagcatagagtttgcgcatggcgcggacatgggcgttgtaatggccatcttccataaagcgcgccagtgtcagttgcaagacttgcggtgtgtggccatccatgatgctgcgcgcgtaagtaaaggtcttgaccaactcatggggcagtatcatgtagcccattcgcagccccgggtagagcgtcttgctgaaggtgcccaggtagatcgtgcgccggtgcttgtccaggccttgcacgcaggcggtcggatgcccgtcgtagtgaaactcgctgtcgtagtcgtcttcgatgatccacctgccctgctccgccgcccagttgatcagctctagtcggcgctccagcggcaacgtcgctcccgtggggtattgatgagacggtgtgacatacacgcagttggcaccgctacgatccgcccgcagcaattgcgtgcggatgcccagttcatcgacgtcaatgccgacgaccttggcttgcgccgcttcaaaggctttcctggcaccgaaatagcccggattttccagcaggatcgattgaccggcgtccaccagtaacaacgcacacaggaacagcgcctggcgcgtactgctcaacaccaggatctggtccggggagcactgggccccgcgctcaaggttcaagtaggtggcgatggccttgcgcagcggcgcggcgccctgggggtcgccatgcagtaacacgttggcgcgatggtccttcatgacctggcgttgcaggcgctcccacacgtcgatggggaaggtgcgggtttccggcaggccggtggcaaacgcagtgaccgcctgctggtcagtgacgccaccactgttgaaaatcatccgcccgcgcaggctcaatcccgcccttggcacctcctcccggtggttcatgtcttggggtttgctacgcctgcgtgctgcgccatgcagttgggtgccaagcgcgtcgcacacgtagctgcccgccccctcacgccgcacgatgaagccatcgcgatgcaattgcacataagcgttctccaccgtgtcgcgcgcaacgccgagtgacttcgccaaggtccgggtagaaggtaacttcagaccgggatcaagggcgccatcgaggatcaacgcccgcagcgcgcgctgaatccgatggttcagatccaacagcttgagctcggcatcgtcgagtcgcattttcagcgtatccaactcgaaggtttttgccatgtggtctggttgactccgcaaaagtgtaggggcgaaacataccatttcaagcctataaatggcgcctccaccaagcacctgactttgcaaggagcaaagcaacatggcctcttccaacgcccactcgcccattcaactacgcgaccttttccacccgattgtcgcagggttggtttcggtcatcgtcaactatggcggcacgttcattctgattttccaggccgccaaggtcgccgggctgagccctgagctgacggcttcgtgggtgtggtcggtgtccatcggcgtgggcattaccgggctcactctcagctggctgacccgtgagccgatcattaccgcctggtcgacacctgcggcggcgtttctggtggtcgcactcgggaccaccccctatgccgaagcgattggggcgtacatcctttccgcggccgccttcgtgctgctgggtttgtcagggcagttcgaaaaagtcatccgcctgattccccctggcgtggccgcagggttgttggccggtatcctgctgaaattcggtatcggcgcgttcggcggcatgagcgtcgacccggtattggtcgggctgctgattaccgcttacgtggtactcaagcgctttaccgcacgctacgcggtggtgggcattctggtgctggggatgggttttttgctgacccaggggcgcgtggatttttcggggctggcgttgcagttcgcggtcccggtcttcacccagcctgagttctcgttgaatgccctgctcagtgtcgcgctgccgttgttcctgatcaccctgacgggccagtacatgccaggcatgctggtgcttcgcaacgatggcttcagcaccagcgccaatcctgtgttgaccgtgaccgggctgggctcattgctcatggcgcccttcggttcccacgcgtttaacctcgcggcgattacggccgccatttgcaccggcaaggaagctgcgcaagatccgtccaagcgctggatcgccggggttgcagcgggcgtgtgctacctcgtgatcgggattttcggggtcacccttgcagcggtgttcatggtgctcccggcaacgttcatcacgaccctggccggcctggccttgctgggcgcgatcggcgccagcatcgccagcgccatggctgacagtcaatcccgcgaagcgtcactgatcaccttcctggcctgcgccgccaacatcacggtgtttggcatcggtggggcgttctggggattgttgattggcctgggggggtacgccgtactcaacgggcgctggtcgcggcgtgagtcggtggtcggttctgccgtcaaacctgttgtaaggactgaggatgccgccaactgatgcaggtgcctggtgcaaagtgatcgccagctaggtcgtcggctcctcggcaccagacggcgcccgataacagcctggcgcctgtctgtgcaacgaaggccagccttgcgtgtagcgagccatacactcactacacgtccagaagatagcccccttcagagcatggctttattgataaataaattgatacccaacgatgtaagaaccgatcttgttagcgtgggccgttacccgcaccgccgtcatgccccgctgtatctgatcattcaaatccgctttattcgtgcacagttgaatccagcgctcggtagtcacatccttgatccacacgccggcctcacaacggctcagctttcccaacgcgggccctgggaaagagatttcataggctgactcatagtgaatggtatctcccggcaataaataagcagcgacatcatacccttgtatggagcaagcaaaaccgacgcaaaaccagccgaaaaaagcgtccatggcgctttttagtgttctcccgcccccgccacgcaagacgcccctgcaagcgaaaaccagtccaacgacacaaccgatagcgatataggtcgtccactcagggatcgacggcatcaaaacggtccgcaggccgatacgcgacgcccagagcatataaacgatccaccccccaagcagcgcaaacgcgaccaacgtgatcgcgatctttcttgatctgttttcgaacgaagggtatttcacttcttgactactcaatgactgacctcagggtgtactccgtatgatgcagcaaaaaccaaccgatacctgacttcttccagtgttgcaccgcccctcacgaggttgcgctcagtgcctggctccgcgacacagcccgcccggcgataaaaccgtatagctcgttcattaaggctcaacacccaaagcgtcagaccctgatagccctgctcgctcagatactcaacgccggccgtccacaacgccagccccacgcctgtttgccagtacccggccaacacatagatggccatgacctcaccggtgttggcacccgcagcctcctcgtcacggctggcaccgaccgatatccaaccgaccacctgtccgtccacctccgcgacccaaaccttgggctcgtccgactcaatcgagtgcatccagaaggattcacgctgcgccagggtcgcttgcaacccgctcaaatactcggcaggcatcaggttacggtaggcgtcctgccaactgctgatatgcacttgggcaatggcccttgcgtcgtcgggtaatgccttgcggatcatgtcggtattcctttttcgagcattggccttccagtaaacccacgccttatgaccgtttatattcgccggggggcgaggtggctatccggcttcgaacaaatcgctgtctgggcgcacacattggctgatatgttacgagcctcacgagcaaagggatgcgccatgccaacgttagccagcaacgccgcactgctgatcatcgacatgcagcaaggcatgaaccagccgaagctgggacgccgcaacaaccccagtgccgaagcgcagatacagcgcctgctgcaggcgtggcggcagtctaagcgcccggtggtgcacatccgccacatatcccgctcgcccgactcggtgttctggccgggccaaccgggttgcgagttccagccggcgctgcaaccgctggcgcatgaacatgtggtggagaagaacgtcccggatgccttcacagccacgggtctggagcgctggttgcatgcgcgcgggatccaccaactggtgatcgtcggcgtgatcaccaacaactcggtcgagtccacggcacgttcgggcggcaacctggggtttgaggtgacggtggttgccgacgcctgctacaccttcgaccagaccgatttgtccgggcgcccgtggccagccgaggatgtgcatgcgctgtcgctgagcaacctggcgatggattatgccaaggttttggagaccactgaaatcctgggtgggttgtgagcatcacgcatgagaccggcaagcgaatcgtggtgattggtgcgggtatcgtcggcgcatccttggcctaccatttggcccactcgggccgccaatcacccacgtggagcttcgccccattcccgtggatggcctccccatcatcggctacctaccaactgtcggtggtgtctacgtgtgcgccatacatccgggggtggtactggcacccgtggtgagccggctggccagtgaagagatcatggacaacaccctcttcgatgcgcttgccccctgccgtcccagtcgattcgttcaagggctgacgcccgcaccctgaagcatttccaagagtccctccggccacaccgtttcttctgttgttcgaagttcagcggcggaccaccagcgatggtcggccatcacctgtgtctcatgcacagtccattcggcttttgacagcgcctcattgggcgcctgaaccacaaaatactgttcgatggccaacactgtttcgccacagggcaacatcaacgtcacgcggcgatcccctacaggcgctgcaacggcctctacctctatgccggtttcttcgcgcagctcacgtatcgcagccgcctcgaaggtttctccggcctcaacacctccgcccggggtcgcccagtaattttgcccggccagtgccccgtctttatgtacgaatctgaacagcagcactgcgtgtgaggggctgatcaccagtagccgtgcggcctttcgctcgcgcattattttatgccttccttgaaacgtgggtttgattacgctatcgcgggctgaccgcgtcaggcgttcaagcgttgtgcgatggccttacgcagctccccatgcgggtcttctgcgtaaggcagcgcattcttccaatcataaaaccacgctggcatccggcgtttatcatccggctccgaggcgtagcgcgggaacaaatggcagtgcagttccggctccgaattgcccaggatctcgtagttcatgcgcagtgcaccggtggcctgcaacaccgcgtcgcccaggcgcgccatgtccagcaggtagagggtacgcgcctcggtatccaggtcattgaggctggcaaccaccgggtccggcaacaacaggcaatagccgggcaggaactgcacatcccccatcaccgcccagcccgaggccatgcggcagatgaccttgtcgttggtgccgttgcgggcctgcgtcacgcgttcggtgataagcgccatgcaaaatccttggtcgagatgaggtccaggcagcatcttaacgcgacctcaagccctggaatcaacccatgcgcattgcctgcataccgcgacccgcaacatcaaccgtgtgcgccctgcaaaacccgctgaaggtaagcgtccagcacatcgatattcgctgacgaaacaatcgcgccgatatacccatcaggccgcaccagcacccactcgccaatcgccagttggtaggcacgttgaaactgaccctgctcgtcaatcacatctccctcaggcccaacgatatggacctgcacgcccggccaagcgggcactgaatcacgcgtgacgctataccccagcagcgtccagtgcgtaccctggaacagatggaacagccgcaacgcctgcccggcggcacctcgcagcagcgcgtccggcgcgcggtcacccgctgcaacgccgttacgcttggggtgctgcaacgccaatgaggactcggggtagccgatgtccagttgatgcacttccctgccccggcgcagttcgccgtgctgcatgtcgcccagcagtctggtggacaaaccgagcacggaggcagccaccggccggcgctcttcttcataggtatcgagtagcgcctcaggggcgccctgcaccaccgccgccagcttccagctgaggttgtaggcgtcctgcacactggtattgaggccctgaccaccggtgggcgggtggatatgcgcggcgtcgcccaccagcagcacccgcccccggcggtagtgatcggccaggcgtgcattcatggtgtaggccgatgaccagctcacgctgtgcacctggatatcggcgcgcccggtgcgttcggcgatcagtgcggtgagcccttcggcgctgaagtcgatgtcgccatcggctgggatcgggccctgaagctggaacagatcggtgccagccagcgggcagatcgcaatctggcgttgcatgtcgccttcgccaaagcggtgccaggcctcacgcgtcaggccggtaagcaccccatccgccaccagtgcacgcacgcccagggtcttgccggggaagccgatagccagcgcaggccggacgaagctgcgaccgccatcggcgcccaccagccagcgcgcacgcaggctcgcttcgccgcccttgccggccagcctggcagtgacaccgtcggcgtcctgttcgaagccgaccagctcacaaccgaactcaggccggtggcccagctcaagcaggcgctcgcgcatcagctgttccgtcagaaactgcgggaccatcaagggttgctggtagggctcggccggtgtcggcgccgtggatgcgctgaaatcggcatcgctgtagctgccgtcgtcgcggtagcgccggtcagtcggatagactccacccaccgccatcaagcgatcgagaatccccaggtcttcgaagacctcctgggacctgggctggatgcccttgccacgcgagccatggaaaggccggggatttttttcgatcaggcgaaaggtgatgccccttctcgccaggtcgatcgccaaggtcaggccggcggcaccggcaccacaaatcagtacatcgacagccgattgcgctttcatactggatcacctatatgtgcaatacgcacatattaagagaggcgaacaccgtgtcaattaaaaatgtgcaaagcgcacatatatccgcccagctgcgtgacctgcatggctcgctggttgaaatcgtcggggtgatgaaccgcccgcaacgcgacgaggcaatggtgcgcgaggccggaatttccctggaccgcgccctgtttccgttgctggtgctggtggagcgcctgggcccgattggcgtggttgaactggccgaccgcgtgggccgcgactacaccacggtgagccggcaggtggcgaaactggagaacctgggcctggttacgcgccaggcaagcgcacttgaccgccgcgtgcgcgagtcagtgatcaccgataaaggcaaggccatgaccgaccgcgtcgatgacgcacgcgagaggataggtgtgtcgatcttctccacctgggaggaaggcgattttgacaatctggtgcggttgatgcgcaagtttgccgaggacatcaaggaggattccgtgcgtgcgacgaaggggatttcctgaggccacccacttgttggtttgctgtggcaagcccgctcgccacaacaagtccgttcacctcagcaagcctgcgcacggcatcaatccaatgccaattccaccaccccgccgttcaaccgcaccggccatacccgcaaccgctgctccggggtctccaggcactgcccgtcttccagccggtaatgctgcttgtagatgggcgccgccaccaccaggtcgcccttgatgctgccgatcaaaccgcgaccgatcacattcgccccggactccgggtcgtgattgtcgatggcatacagcgtctgcgcctgcgcgcccggcaggtagaacaacgcgacttgcgcgccgtccagccacaccaccacgccggagtcgcgcaccaggtcttgctcgcggcacacctgtgtccaggtggccaggtggcgttgggtattggtttggctcatcaggcaatctcctcggtgacggcaatcaggttgagttcagcagccatgatcggccggcgttggccgcgttcctggacgaagtggatgtccgggtcggggcgtttgtcgttgacgaaggtgcggaaacgcttgagtttttccgggtccttgagggcgttggcccactcgcattcgtagcggtcgaccaccagttgcatctgcgcttcgagttcggcgcccaggcccaggctgtcgtgcaggatcacgtccttgaggaaatccaggccgccttccaggctctcgcgccacaccgaggtgcgctgcaacttgtcggcggtgcggatatagaacatcagaaagcggtcgatgtagcggatcagcgtggcgtcatccaggtcggtggcgaacagctccgcatggcgcggacgcatgccgccgttgccggcgatgtagaggttccagcccttctcggtggcgatcacgcccacgtccttgctctgggcttcggcgcactcgcgggtgcagccggacaccgcgaacttgagcttgtgcggcgaacgcaggcccttgtagcgatcctcgatcagcagcgccattttcacgctgtcttgcacgccgtagcggcaccaggtgctgcccacgcaagacttcaccgtacgcgtggacttgccatacgcatgcccggtctcgaaacccgccgcgatcaactcgccccagatatccggcaactcgtgaagctgtgcgccaaacaggtcaatgcgctggccgccggtgatcttggtgtagaggtcgtatttcttcgccacctcgccgatcacgatgagtttttccgcggtgatctcgccgccaggaatacgcggcaccaccgagtaggtgccgtttttctgcatgttggccatgaacgtatcgttggtgtcctgcaatggcaccagggaagcgtccatgatcggctggttccagcacgacgccaggatcgaacccaccgccggcttgcacacgtcgcaaccggtatggccacggccgtgcttggccagcagttcgtcgaaggtgatgatgccttccacacgcaccagcgcgtacagctcctgccgggtgtaggcgaagtgttcgcacaggctcttgtcgacactcacgccacgcgcaatcagttcatgttcgaacacctgcttgagcaacccggcgcagccaccgcaaccggtgcaggccttggtctgggacttgagcaggccgaggtcgctgcaactgccgtcgatcgcagagcagatcgcacctttggtcacgttatggcaagaacacacggtggccgattccggcagcgcaccggggccgagggtgggtgcgccgctggtggatggcaggatcaggccggccggttcggacggcagtgtgatgccgttctgcatgtactgcagcaaagtgtcgtagtagctgttgtccccgaccagtacggcaccaatcacctgcttacccgaagcatccaccaccaggcggcggtagctcgcgctggcctcgtcgatgaattgatagctgcgcgcgccaggcgtgtgggcgtgggcatcgccgatggagcccacgtccacgccgagcaacttgagcttggtcgacatgtcggcgcccacaaacggctcggcggtttgcccacagagcagcgcggcgacgccccgggccatctggtagcccggcgcgaccaggccgaacaggctgccgttccaggaagcgcattcgccaatcgcgtagatattcgggtcgcagctcaggcattcgtcgttgatcaccacgccgccacgcgggccgatgtccaggccggcctggcgggccagtgcgtcctgggcgcggatgccggcggagaacacgaccaggtcggcttcgaggaattcgtcattggcaaagttcatgcggtagcggtactgctcgccggcgctgatcgactgggtcgcccgtgacaaatgcacgcccacgcccagccgctcgatctgcgccttgagcgccaggccgccgaagtcatccagttgcaccggcatcaggcgcggcgcgaattccaccacgtgggcttcaaggcccaggcttttcagcgcgttggcggcttccaggcccagcagaccaccgcctaccaccacgccgcgtcgggcattggcggcggccttgcggatcgcatccaggtcttccagggtgcgatacaccaggcgcgagtcgccctcggcgccttcgattggcggcacgaacgggtaggaaccggtggccagcaccagcttgtcataggcgacacagccatcggcggtgatcacctcacagcgggcgcggtcgatctccagcaccggcacgcccaggtgcagggtcacccccggcgtctggtacagcgcagcgtcggacagcgccagcgactcggcatcgcgcccggtgaaatactcggacagatgcacccggtcataggcgcgcatcggctcctcgctgaacacatgcaaacggtagtgatccagcgcgccgcgttcgatcagttgcgccacacagtggtggccgaccatgccattgccgacgacgatcagggttttgagactgttcatataaatcacctgacaaagctcatcacggttttaaaagcaaaaaaaaacgcctgaaaccttgcggttccaggcgtctttgcctgttcttgtgcgggtttggatcgggcgactgcgccggattcaccgctattgccctggttgtcgatcgtcgttgaccgaggtgggttgcaggggagcttgcagggtctgtgccaagcgaagacccggcccgcgcttactgcattacgcgctcaacaacggctatgaacgtgagcagaatcgcctccaactggtgcgcctcgcgtcataaaagtgcacaacccttcctcctgtggtgaggggcttgttgtggtgagcggggctgttgtggtgagcgggcttgccccgcgttgggctgcgtagcggccctaaaggtaaacgccgcgatctttctggaagatcgcggcgtctggatcagggctgcttcgcagcccaacgcggggcaagcccgctcaccacaacaagcccgctcaccacaaaaagcccggccaccacaacaaccccattcacccagcaaattgcatcaggaaaaacctggcgcgtgacttgctaggaacactccaaccgggcagtcaacgcagactgccctctcacgacaaaggcgccgtgtaacccccgttctgaacggagggttacaaggcgccttttttgtttatacgggtttcagatggccaaccaaaacatacgcagtgtgtgtccctattgtggcgtgggctgcggcatcatcctgcaggtcgagcacaataaagtggtcaaggtgatcggcgacaaggcccatcccaccaacttcgggcgcctgtgcaccaagggcaccacctgcggccaggccatcgccgagtcgggccgtatggagaacgcctatgtgcgccaggcccgcgaccatgacccggtgcgcctcggtatggacaaggccatcagcgaaaccgcccggcgcctgcgccagaccctcgacacacacggcccggacgcgctggccttctatgtatcagggcagatgtcgctggagtcccagtacctgatcaacaaattggccaagggctttgtgcgcaccgccaacatcgagtccaattcgcgcctgtgcatggccagcgccggcagtggctacaaactgtccctcggttccgacggcccgccgggctcctatgaagacttcgaccgtgccgacctgttcttcgtgatcggcgcgaacatggctgactgtcaccccatcctgttcctgcgcatgatggaccgggtcaaggccggggcgaaactgatcgtggtcgacccccggcgcagcgccacggcggacaaggccgacctgttcctacccataaaaccgggcaccgacctggccctgctcaatggcctgttgcacctgctggtgaaaaacggccataccgaccctgccttcatcgcggacttcaccgaaggctgggaagcgatgccgccatttctggaggactattgccccgagcacgtcgccgccatcaccggcctcgccgaagccgatatccgccaagccgccgactggatcggccaggccgccgagtggatgagctgctggaccatgggcctcaaccagagcacccacggcacctggaacaccaacgcgctgtgcaacctgcacctggccaccggcgccatctgccgcacgggcagcgggccgttttccctcactggccaacccaatgcgatgggcgggcgcgaaatgggctacatgggcccgggcctgccgggacaacgctcggtgctcgtcgaggcagaccgcgcctttatcgaggacctgtggcaaatcccccacgacagcctgccgcgccaggccggcagcggcacggtggcgatgttcgagcagatggccgctgggcagattaaggcttgctggatcatctgcaccaacccggtggccagcgtgcccaaccggcaaaccgtgatcaacggcctgcaaaccgccgaactggtgatcagccaggacgccttcctcgacaccgagaccaaccgctacgccgacatcctgttgcccggcgcgctatgggccgaggccgaaggcgtgatgatcaactccgagcgcaacctgaccctcatgcaaaaagccgtggacgcccccggcgagaccctgcccgactggcagatcatcgcccgggtcgcctgtgagatgggctttgccgaggcctttacctatgcctgcgccgccgaggtgtttgaagaaatcaaacaggcctggaaccccaagaccggctacgacatccgtggcgccagctacccgcgcctgcttgaaaacccggtgcaatggccctgcgcttcggttgacgcagcgcaccgcaacccgatccgctaccgccatggcggcaccctcagcttcgccaccgaaaacgccaaggcgcggttcttcgctcgcccgcatatgccgcccgccgagatgcccgacgacgggtttcccttcgtgctcaatacgggtcgcgtgcagcaccagtggcacaccctgaccaagaccggcaaggtcgccaccctgaacaaactcaaccccggccccttcgtcgaactgcaccccgaagacgccgcccgcctgggcatcaaggacaaggaccgggtcgaaatacgctcccggcgcggccacgccgtgctgcctgccgtggtcaccgaccgcgtgcagccgggcaactgttttgcgccgttccactggaacgacgtgttcggcgaacacctggcgatcaacgcggtgacccatgatgcggtggacccgatttccctgcagccggagttcaagtgctgcgccgtcgccctcagccgcgtggagctgatcgaccaccagttcctcgaccgcccttcccccgtagcagaggacaccgccatgtcgcgcctcgacgccttcgctgacatcaatggcatccgtcacctatcgccaccggccctgagcgacgacgaacgcacctacctcgccggtttcctcagcggcctgcacaccagcgccgcacgccagggctttggcgtaccgaccctgccggcaactgcaccgctggcggatgccgctcgcctctggctgaacggcttgcttgccggcttgttcagtcctgcagaatccctcgcggcgccctccccggcggtcaccctgctgtgggcctcgcagaccggtaatgccgaagccttggccgagcgctttgccaagcgcctgcgcgaaacaggcatcaccgtggaactgagcgcgatggcggacttccccgcgagcaagctggcaagcactcacaccctggcgctgatcagcagtacctttggcgacggcgacccgcccgacaacggcgaaggtttctggcacagcctgcgcaccgccgagacccgcctggagtcgttgcgttttgcggtattggccttgggcgatccgaactacgaccagttctgcaaccacggcaagcaactcgaccggcgcctgctggaactgggggcaacccgcctgctggaacgggtggactgcgacactgaattcgaagccgccgccgatgcctggctggcgcggttccagcagaccctcaacccggcaaagccgatggcaccggccacccccgccggtaaaaccaagctgtacggctcacgcctgttgctcaaccgccacctcaacccgcacagcgcgcacaaggaaacccgccagttcgccctagacctggccgactccggcctgacctatgaagccggggatgccctgggcatacggccacgcaactgccccgaactagtcagcgaactgctcgacctcacccgcctgagcgccaacgccagcgtgaacatcgacaccttcggcgatgtgccgttgcaacaggctctcacccagcattttgaaatcgcccggcccagcagcgacaccctggccttcatcgccgagcgcagcgccgacccaggcctcaagcacttgctcaagcccgagcacaaggccgaactcaatgactggctgtggggccggcaactggcggacgtgctgcaggaataccccatcgaatgctcggcggatgaattgctaggcaccctcaagcgcctgcaaccacgcttgtactccatcgcctccagcgccaaggcctacccgcaggaggtgcacctcaccgtggccgccgtgcgctatggcaagcgcaaaggcgtgtcgtcgaccttcctcgccgaccgcgccggtgacggggaagtgccgctgttcgtgcagccgtcgaaacacttccgcacgcccagcgacggcgaggtgccgatgatcatgatcggccccggtactggcatcgcgccgttccgtgggttcttgcaggagcgccgggcgctgggtcatcaggggcgcaactggctgttcttcggcgaacagcatgccgccagcgacttctattaccaggacgagttgcaaggtatgcagcgcgatggcctgctcacccacctgagcctggcgttctcccgcgatcagacgcagaagatctatgtgcaagaccgcatccgcgaacagggtgccgagctatggcgctggctacaggagggcgccaggctgtacatctgcggcgatgccagccacatggccaaagacgtcgaccaggccttgcgccagatcgcgcaaacccacggcgggcttggcgtggaaggcgccgtggagtactggcggcagttgagcgaacagaagcgttatctgcgtgatgtgtactgattggatacagaacaatatgcactttgtattgtgtacaaaaaaccctaaagatttaccggtaccgggccgaaacagcagtgatagcaaatcgcctgaatcctgatcagggaacgcagcgatttggccgcccttcacgctgatggtcgtctcgatgaaaataaaaaataagctggtcctcgcatttgtctccgttgcatttattccggtaagcctggtggccgtgatttcggtcatgaacacacggacccaggcggtggatcagttcatcgatggcagtacccgggagatccgccagatcgatggcaacattcgccagttcttcgatggcacgttgcaaaacgtcgatcagatggcaacggatcctgtatacacgtctgtcagcacgctaaagaactaccaggccgccgatgccgccagccagccgctgccggccgaggcgcaagcggtgatcgagcgcttcgcgcgcttcggcgccacgcacccggcggcggcgatcctgtccatcggcctggaagacggcacctacgccaaatggccggatgacccgcaactggccaagtacgacccgcgcacccgcccctggtacaaggcggccatggccagccccggcaagaccgtgcgcaccccggcttattactatgacaaggacgatgtagcactggtgggcaccgcccgggcgatgctggagaacggcaaggccaagggcgtgttcgtggtcagcgtgtcgctgaaaaacctcaccgaactggtcaagagcatcaagctgggcgaaagcggctacgtaatgctgatcgaagacggcgtggtgctggtggacccgcgtgacgctgcccacagcttcaagccgctcaaggacctgggggcgccgtatgcgcaattggccgacacgccccaaggctccaccgaggtggtgatcgacggcgtacgctacatggccaacgtgtggacctcccccggcctcggctggcgctacatcggcctgatcgaacaccgcgaagtcatggctgaagccacgcgcatgacctacctcaccgcgatcatcgtcggcgtgctggtgctgatcttcgggctgatcgcggcggcgttctccaaggtcatcgtcaagcccatcggccaggtcagcaccgggttgcagtccatcgcccagggcgaaggtgacttgcgccacgaactgcacgtacagggcaaggatgaaaccgccgaactggccggctggttcaacaagttcctcgcggcgatccgccaactgatccagcacatcggcgcagcctcggccaatttgcacaacgcctccaaggtcaacagcgaggtggcgcacaacatgaacgaggcggccgggcgccagcgtgaagcggttgaattggtgtcgaccgcgttcaacgaaatggtcgctaccgccaacgaagtcgcgcgttcctgcagcggcgccgcggagtccgccgagaatggccaccgtcgcgtggccgaaggcaagcagcagatcgaagtcaccaccgacaacgtcaaccgcctggggcgccgactcaccgagtcgtcccaggccatggtcgaactggaagccggcagccgtagcatcaaccagatcctcggcaccatccgtgcgattgccgaacagaccaacctgttggccctcaacgccgcgatcgaggctgcccgtgccggcgaccagggccgtggcttcgccgtggtggccgatgaagtgcgcgccctggccaagcgcacctccgactccaccggtgagatcgagcaactgctcggcaccctggaaaacaagacccaggaagtcacccagaagatgggcagttgcctggacctgtcgcgggccagcgtgtcgtccatcgaaagtgcgcgggacagctttgaaggtatccagacgtcggtgaacgagatccgcgaccagaacctgcagatctccgccgccgccgaggaacaacacagcgtggccgaagagatcaaccggcatatccagcagatctacgacgaggcgcgcctggtagagagcctggccaactcggcgcaggacgactcggggcgcttgtcgacgctgtcggatgaactcaatggcttggtggggcgcttcaagtcctgaggaagtcggcgatctggcgccacatggcaaacgctcagatgcgcgattgcgccgggctcatgggtgatgcctctcgatcaccaggccttcagcctcgctcggcacactgaaatggcgggtaatcagatcaaactcagcatcagtggcggcaaagtcgtgctcaccctgagcgttgcgcgcatgcagcctggcccgacaggtggcgtcatccagctccaggtagtgcaggcagtgccgggccttggcggcgtgtgccaaccccagcagccattcgcgactggccactgtattggcggggaaatccagcaccacgttgaggcccgactgcagcacattgatcaccaaggggcccagtacgccgcgaatgcgctgggtgcatttgatgtaatccgcaatggcgtggatttcaccggggtaaagcgtggcgagccagtggtcttcgctgagcacaatggcagcgtgctcagtggcgagggtcttggcgagcgtggacttgccggaggcgatcttgccgcagagcaaatgcagggtgggcatggggcggttccttatgtcagtcccgccagcatgaccgccatggattgatcacacaacgccccgtttccaatgctcgtagaacgccagggccgcgacgttcttgtccttggcttcgagcatgatgtcgaagcggtcgagaaactgcagcgcataatcgttggtccagcggttccacatctgtgcgctgtgggcgtacaggtcgcgcttggacaccacctgcaacagcgcgtccatttccagcttgtgttcggcgtcgaagcccagttcctgcagactctcctggggttgggagtagtgcatggtcgggcgcacgccacgccagctttcaatcacccgggcgacccgctcggagtgggggtcgatgtagtcgttctcgttgatccagcagtggtggatgtccaggaccaccggtgccaggtcggcgacttgcaggcaatggtccaggccataggtcttttcgtcgttctcgaacgtgatgcagttgcgcgccacctccgacaggcgcgaccacacggcgcgggtgccttccacaccgagacggccggcgatatgcacgttgcacttgaggtcttggaagcgccggccatagcccatcatgcggatcatgtcggcgtggtattcgaattcggcgaggctgttttccaccacgccggggttttccgaaccgagtacacagtattggccagggtggaatgacaggcggatatccgaggcgcgggccagctcgccgatggcggcaaacccctctatcaattgacgctcgatagccgggtcttggtagacgctggccactttggggtggctgtagaacggcaacagatcgctgctcaagcgcaacatgcgcaagggcgacggcagttcggcgacatacgccaacaagcgtaattgggcggccaggttatgcgtgaccacttccaccagtttgtcccgggccacctgcggtgtgacgctgtccatccaccgcaacgtggtggtgcgtgggttgaacgggccttcgatcagcttctgggcgctggccgacaacagccgttcgggatgtttgtattggcacgcgaagccaatgcgagggtgagtcatggaggcgcctggcgtaggaaaaaggagcgaatgatacggggttagtccggggtctacccagcgcggttcccattatttctaaacgtttcacgctgaactttctcaccggcgctgcgttcacttcttatgcgctgccccgtccaggggcgttgtacaacaaggagccgctcccgtatgactaccctccccgcctaccgctacgcccccgggccgctgcatgcgaccttgctcgccggcaccgtgccgttgtttctcggagccttgctcagcgacattgcctacacccagacctaccagattcagtgggccaacttcgcctcctggctgatcgccggtgcgttggtgttcgccggtttcgcgtttctgttcgcgctggtcaacctgctgcgtgccgagcgcaaggccgggcaacccacgcgttatgtgctgttgctgttggccacctgggtactcggcctggtcaatgctttccagcatgccaaggacgcctacgcctcgatgcccggcggtctgatcctgtcggctattgtcttgctgttgaccctggccgccacctggaccggcctgcgtgcgggaggtgtcaaatgaaaacgtccaacacattgacgctattgagcaccgccctgctgctgaccgcctgcggtggtgaaggcgacaagacccaggcccgtggccccgaccccaagttgccggaacagcaaagcagcctgttgccgagcatgaagatcgccgagcccgcgccctggggcgaacagaaacccaaggtgccggacggctacagcatcaccgcgattgccaccgacctggcgatcccgcgccagaccctggtgctgcccaacggcgacatcctggttgccgaaggccgtggcggcagtgcggccaagctcaagcccaaggatgtgatcgccagcctgatcaaggccgagggcaacaccaaggtcaagagcggcaaccgcctgaccctgctgcgcgacgccgatggcgacggcaactacgaactcaagaccgtgttcgccgacaacctcaatgcgccctacggcctggcgtttgccaacggcaaactctatgtggccaaccaagacgcactggtgagcttcgactacgccgatggccagaccaaagccagcgggccgccgagcacagtcaccgccctgccggcacagatcaaccatcactggaccaaatccctggccgtaagcgccgatggcaggcagctgtacgtgggtatcggctccaacagcaacgtcaccgaacgcggcatggaagtggagatcgaccgcgcaatggtctggcagatcgacgccgccaccggtgcgcacaagccctacgccaccggcctgcgcaaccccacggcactgaccatccagccggacaccgggcaactgtggacagtggtcaacgagcgcgacgaactcggcccggacctggtaccggactacttgacctcggtgcgtgaaggcgcgttctacggttggccctacagctactggggccagaacgtcgacccgcgcgcccagccgcaaaacccggccaaggtggccgccgcgatcaagccggactacagcctgggctcccacgtggccgccctcggcgtggacttttccatcccgcagatgggcgagcagtttgccgatggcgtattcgtcggcgagcacggcagctggaaccgcgacaacccggtgggctacaaggtgatcttcgtgccgttcagcaatggcaagccgtccggtgagcccatcgacttcgccaccggctttcgcggcgacgacggcaagacccgtgggcgcccggtgggtgtgacggtggacccgaaaggtgcgctgatcatcgccgatgacctggccaataccgtttggcgcgtaacgcgaaaccgttaaacaaaatgtttgacatgattgccttaggcaacaatattgttgcctaaggcaaccattcgagcatttcaacatgtccacccccttgcttgtcgaacgcgccggcatcgtgcgcggcttcaatcgcttctacacccaccagatcggcgtgttgcaggaacacctgctgcaaagcgattactccctcaccgaaatccgcgtgatgtacgagttgtcctcccgaggtgatctcaccagcgccgacctgtgccagatgctcggcctcgacgcgggttacctgagccgcctgaccagtggttttgaaaagaaaggcctgatccagaaagtccgctgcgccaccgacgcacgcgccgtgcaattgcacctcaccgaccacggccgcgccgtgctggcgccgctggagcagcaaacccagcgcgaagtcatcgcccttctcgacagcctccccgagccacaacagcagcagctcaccgcagccatgaaacgcatccaggccctgctgcaaggcacggcgcccagctacctgctacgcgacccgcaacccggcgacatgggcgtggtggtgcagcagcaaaccgcgatctacgcccgtgaatacggctggaactgggagttcgaagcgctggtggcggagattgtcgccaagtacttgcgcgagtttgatcagacctgcgagcgttgctggatcgcggaaaaggacggtgaggtggtgggctcggtgttcgtgatccgccatgaccagaccacggccaagctgcgcatgctctacgtggatgccagcgcacggggcatgggtatcggccagcgcctggtggatgaatgcgtacgctttgcccgccaggtgggctacacacgcatgctgctgtggacggtggacatcctcaccgacgcgcgcaagctgtatcagaaagccgggttcgagttgatagaggaagagccgatggtcagcttcggtaaaaccctggtcagccagacctgggctcgccagctgtgaaacagtcccgcgccagggcggcgcgggacatgacgccttacaggtcagtgatttccttgtggcgcggcaccagcgttttcatcacgctccaggccaccaggtaggccagcgcacagatcgcgaacatgatcatgtagccggtatggatgtcgttgatggacttgtagtagtcgaacacccagccgccgatcttggtcatcaccacgccacccaggccgccggccatgccgccgataccgaccaccgaggccacggtcttctgcgggaacatgtcggacaccgtggtgaagatgttgcacgaccacgcctggtgcgccgaggcgcccacaccgatgagcattaccggcacccagaagctgatatagcccaacggttgcgccagcaagaccaccagcgggaacaacgcaatcaccagcatggctttcatgcggccgtcatagggtgcatcgccgcgcgccatgaagtagctggggaaccagccgccaccgatgctgccgaccatggtcatgctgtacagcaccgccagcggcatgacgatatccgcgcctttcatgccgtactgcgctgacaggtaggtgggcagccagaacaggaagaaccaccacacgccatcggtcatgaacttgccgaaggcaaaggcccaggtctggcgataggtgagcaacttgagccatgagacctttttctccacggcgctggccgctaccggggtgaagggctgcacggtctggtcgctgcggatataggccagttctgcggccgacaggcgtttttgctcctccggctttcggtagagcgcgatccacaccgcgacccacacgaacccgagcccgccgattacgataaacgccgcttcccagccccacagaccggcaatcaaaggcacgcagatcggcgccaggatcgcgcccacgttggcgccggagttgaagataccggtggccagcgagcgttctttcttggggaaatactcggcggtggccttgatcgcaatcgggaagttgcccgcctcgccaatcgccagcaccgcacgggacagcatgaagccagcaatcgacaccgggatcaccgccaggccaatcgcaccgctgatggcggcgatgccctcgcccatcggcaccgagaacgcatgcatgatggcgcccgtggaccagataccaatcgccaccacataggccgccttggtgccgatcttgtcgacaaagcgcccggcgaacagcatcgagatcgcatagacaaactggaacaccgccgcaatgttcgcgtagtcggtgttgctccagccaaattgcgtggacagctgcggcgcaagcaggctgagcacctggcggtcgaggtagttgacggtcgttgcgaagaacagcatcgcgcagatggtccagcgatagttgcctaccgcttggccaacgcggtgcgcgtggatgggctcgttcaagttcatggcatcactttttatttttgttaggtaggacatatgtaacgtcatatgtcgtcgtacaactgcgacttttatatccggccgcctaccggctgtcaatctgaaagattgccgtttatcgaggtattgcgagggtcattgaaaggtcaggtctatgcagttgtaggatgacaaatgcgcatgaccaggctgggcgccttgccccgtacatcgtcgagcacgccaaacggctgcatgccgatcttttccagcacccggatcgaggccccgtgatccggtcgcaccagcccgaacacctcgggcaaccccaggctgtcgaatgccagcgccaacgcgtcatgccccaactcggtggcatagccctgcccccaggcttccaccgcaaagcggtaacccaggttgatgcgccgctcggtcaggtagtcgaggggcgcgataccgccgaagccgatgatgtggtccggcgcctcgcgccgtgcaatcgcccaccagccgtacccttgggtcacccactgtacgagccagtgatccagcaggcgttgcgccacctccaggctggccatggggccagacgggttgaacaaattggtctgcgggtcgccgaagatcgcgaacaatcgctgcaggtcgttcgcttgtggttggcgataggtcaggcgtgagccggcggacatgcggattactcctctgtggctgtagtgagcgggcttgccccgcgctggggcgcgaagcggccctaacaccaagcaccgcattttgtctgaagaaatgcggtgattacattggggtggctgcgccacccagcgcggggcaagcccgctcaccacaacaggtccgctcaccactaagcccgctcaccgcaaagaatgcaaaaaaagcaaaatacgggtgaattatttcatgtccacttgtatctgaagtgacagagcggtgccatcgcagtgatggcgcctcccctgttctgctttagagtgccccgcatgaaattacgtaagaaaagcgtcaagcccatcggattgaaagacatcaccatcgtcgacgacaccaaggtgcgcaaggcgattaccgccgccgccctgggtaatgccatggaatggttcgactttggcgtctacggttttgtcgcctatgtgctgggcaaagtgttcttccccgacgcctcacccagcgtacaaatgatcgctgcactcggcaccttctcggtgccgttcctgatccgccctctgggtggcctgttctttggtgcactgggcgataaatacgggcggcaaaaggtcctggccgcgaccatcgtgatcatgtccctgagcaccttcgccatcggcctgatcccctcctacgcctcgattggcatctgggcgccgatcctgctgctgctgtgcaaaatggcccagggcttctcggtgggtggcgaatacaccggtgcgtcgatcttcgtcgcagaatatgcgccggaccgcaagcgcggcttcctcggcagctggctggacttcggctccatcgccggcttcgtgctgggcgccggcgtggtggtgctgatttccagcatcctgggcgaagccgacttcgagtcgtggggctggcgcctgccgttcttccttgccctgcccctgggtatcatcggcctgtacctgcgtcacgccctggaggaaaccccggcgttccagcagcacatggacaaaatggaacaaggcgaccgcgaaggcctcacccacggccccaaagtctcgttcaaggaggtcgcgaccaagcactggcgcagcctgctgacctgcatcggtatcgtcgcagccaccaacgtgacctattacatgctgctcacctacatgccgagctacctgtcccataacctgcactacaaagaaaacagcggcgtgctgatcatcatcgcgatcatggtcggcatgctgttcgtgcagccgttcatcggttttgtcagcgacaagatcggccgcaagccgttcatcatcgccggcagcatcggcctgctgttcctgtccattcccgcctttatgctgatcaccagtggcaaaatcgggctgatcttcgccgggctgctgatcctcgcggtgatcctcaacttctttatcggcgttatggcctcgaccctcccggcgatgttcccgacccacttgcgctacagtgcattagccagcgcgttcaatgtctcggtattgatcgccggcgttacgccgaccgccgtggcctggctggtggaaagcaccaacgacctgtacatgccggcctactacctgatggtgtttgccgtggtcggcctggtcaccggcctgaccatgaaggaaaccgccaacaagccattgcgtggcgccgcaccggcggcgtcggacatggaagaagccaaggagttgttgcaggaacatcacgacaatatcgagcagaagatcgaagacatcgacgccgagattgccgaactggaagccaagcgtcagaacctggtgcagcagcatccgcgtatcaactaaggcctgaccctgcatggcggccccagccgccgccatgcttttggagagttcaaccatggttccaagcgtcaccgcaccacagtcgttgctcagcgcagatgaacgcgccgccatcgccgaaatagaagccaccaccagcatcctgcaactggtcacccgcctgaccggcatgcgcttcgccggcatcgccaaattcaccgacctggaatgggtggtctgctctgtgcacgacaccgtcgacatgggcattcacgtcgacgacgtactcgacctggaaaccacgctgtgcagcgagttctgcatcaacccacagaccctgttcatcccgcagatcagccagagcggccgcttcgccgcgcgcccggtggtcaagcaattcgccatcgaaagctacgctggtgcaccgatcttcctgcccgacggccgtctgttcggcgcactgtgcgcgctggattcacgggcgatgctgttcgaagaccccaacctgccggaaaccctgagcctgtttgcgcggctgatcgggtgcattttctttgccaacctgacgccccgtgacacctgatcgttcagcttttcaagcgcgctgccgatagcctgggatacccctgacttgcagcgctgccctgcgggaaacaatgccgaacactctcgccccgatcgtccgtacgctctccaaccgcaccagtctgtcgctgacacgtacctccctgttcaatttcacggccctgttggtcctggtctttgcagcggcagcttattcgctgatctacctggcccatgaactggaccacgccgagcaagaggaaagcgcgttttacacgcgtaaagccgtgcagtccctggaaaaatccttgcgggtcaccgtcaaggactacgccttctggagcgacgcgtacaagcacttgcacctcaaggtggacaccgattgggcctacggtcgcggcaacatcggcgccacactgttccaggatttcggcttccagggcctgttcgtggtcaacgatgccaaccgcacggtgtacgccgtcgtcgaaggccaactgcaacccattgacctaagcgactggcttgcccagcccatcacgcacgtgctggaacaggcacgcgccggggctgagcaggagctgccggtcaccgcttttatcaacgtgcatggcagcccggcacttgtggctgcagccgccatcacgccaggcaccgaccccacggtgaagatggatgggcgccccgcatcggtactggtgtttgtcgacatcctcgacagcgcccaactggccctgatcggcaatgatttcggcgtcaatcaactgcatatcgccagcgccgatgagatcggcaagaccttgctggttcctctgggcgacaacggtgctgccggcagcctgcattggcagccagcgcgcccgggtgtgcggttgatgggcgtgggcttgccgctgctgggcctggccgcgttgctggtatgcctgatgacctgggtgatcctgcgccgcgccagcgccgccgccctcgccctggatgccagccacgcatcgctgcaagacagccaggacgcgctgaccaccagtgaagcgcgctttcgcgatgtggtggaagccagctccgactgggtctgggaaatcgatgccggctggcgcttcacctacttgtcggagcgcttcgagaacgtgaccggcctggcccgccgtgcatggatcggcgccgccatcaacgacctcctggacaccgaagccggcgcgctttcgcaatggctgaacacccccagccgcaccgcggacatcagcgtgcagtgccgctatgtcgacgcccacggccaggaacgcaccacacggcttgccgcgaggcaaatgccctgtggcggcttccgtggaaccgccaccgacgtgacggaggaagtcgaggcccggcgccgcatcgaattcctgtccgaacacgacgccctcaccgggttggccaaccgcacacgcctgcaagcgttcctcgacgacaagctcaaggcgctgccagcgtcgggccaaccgttggtcatgctcagcctggacctggaccgcttcaaaccggtcaacgatctgctcgggcacgcagccggcgaccacgtgctcaacgaagtgtcgacccgcctggccgattgcgtgcgccacggcgacctggtggcacgggtgggcggcgatgagtttgtgttgatcctcacgaatgcgggcacccaggacgatgtcgagtccctgtgcctgcgcttgatcgagtccgtcgaacaggcggtcagggtcggcgagcaggaagtgttcgtcagcgcgagcatcggcatcgtgctggcccccgatgatgccagcgaagtcgccgaactgctgcgttatgccgatatcgcgctgtacgaagccaaggcggccggccgcaatacctggcggttttactcgggggagatgaatgcacggatcatcgagcgtcgccgcctggaaagcgacctgcgttttgcaatcaagcacaatgaactgcgcctgcacttccagccgcgctatcgcattgccgatggacagatggtcggtgccgaagccctggtgcgctggcaacacccacagcgcgggctgatttcacccgagaccttcatcccgattgccgaagagtccgggctgatcctggcgctgagtgactgggtgctgcaaaccgcctgcaccagcgccgcccagtggcccgaggcattgtttgtgtcggtgaacctgtcgtccacggagttcaagcgtggcgacctggtggagcgcattcgcaatgccctcacggcgtcggggatcgagccggcgcgggtcgaactggaaatcaccgaaagcgtgatgctcgaagacgcggcgggcgcactggcggtgatgcacacgctcaaacgcctgggcatacgcattgccatggatgacttcggcaccggctattcctcgttgagctatctgcgggccttccccttcgacgggttgaagatcgaccgcagcttcctcagccgcctcgaagacagtgaggatgacaaggcgatcatccaggccatcgtcggcctggggcgtgccctggcattgacggtgaccgccgagggcatcgagaccgccgggcacctggcaatgctccgggccgtgtcctgcgatgaaggccagggctattacctcagccggccactggatatcgacacgttcaacgggctgctcggcactagcggaaaaactgactcggcgtcttgccaaactgtttcctgaacatgctggtaaacgcactcgggctgtcgtaacccagctccagggcgatatcgatcaccttctcgcccaccgcaatgcgttccagcgccagcagcaaacgtgcctgttggcgccattggccgaaggtcatgccggtttccttgcggaacaggcgctggatggttttctggtccaagtgcaggcgttcgctccagtgcgccacggtggaggcgtcgcccggctcttcctgcaacgccaggcagatgcgctgcaggcgcgggtcggcgggctgcggcaaggacagcggcaacgccggcaggatcgccagttcgtcgaggatcaggtgcatgatccgcgcatcccgtgagtcttcggcgtacggcggcttcaggctcacggacgccttgatcagctcgctcagcaacggcgagatactcacggttttcggctcgccgggcatattcgggaagcgatccgggcgcacaaacacgctgcgcattttcagggtgcctacgcaacgcagggaatgcacttgcccggcgggcatccagatgccacggttgggcggcacggtccactggttcagcgccgagtacaccaccatcacgccttcgatggcgtagagcagttgatgcttctcgtggctgtggtcggggatcacccagttttccgggtaatcggtggcggaactgatgacggcccaggcgccttcgttgatttcctgaagaaattcatccagtggtttgatcatttcgcccttttcgcgatagttgccgccccaattgcgtgagacaggcattcctgacaaatctagcatgaacgccgaatcattttgtaatggatggcgaccttaagaagttgccgcctctgattagctgccttgtatggaatgcctgcatgtcgacccttaccgcgtcacccgccgctgcaaccactacgccccaggccagccccttggtcatgcgcatcctcggcgcctgcgccctggcccacttgatcaatgacctgatccaggccgtgctgccgtcgatctacccgatgctcaaggccaactatggcctgacattcacccaggtcggcctgattaccctgaccttccagttgaccgcctccctgctgcagccgtggatcggctatcacaccgaccgccaccccaaaccctggctgctgccggcgggcatggtgtgcaccctgatcggcatcctgatgctggcgtttgtcggcagcttcccggcgatcctgctggcggcgggcttggtgggcgtgggttcgtcgaccttccacccggaaacctcccgcgttgcgcgcctggcctccggcggtcgctacggcctggcgcagtcgaccttccaggtcggcggcaacaccggcagcgccttgggcccgttgctcgccgcggcgatcatcatcccctacggccagggccatatcgcctggttcgggctgtttgccgtgttcgccatcctggtgctgtacggcttgagccgctggtaccgccaccacctcaacctgttcaagctcaagcaaggcggcaaagccacccacggtttgtccaagggccgcgtgacctttgccctggtggtgctggccgtactggtgttctccaaatactggtacatgaccagcctgaccagctacttcaccttctacctgatcgagaagttccagctgtcagtcgcaagctcgcagatgtacttgttcctgttcctcggcgcagtggccgtcggcacctttgccggtggcccgatcggcgacaagatcggccgcaagaaagtcatctggttctcgatcctcggcgcggcgccgttcaccctggccctgccctacgtcgacctgttctggacggcggtactcagcgtggtgatcgggttcatcatcgcgtcggccttctcggccatcgtggtgtatgcccaggaactggtgcccggcaacgtgggcatgatcgccgggatcttcttcggcctgatgttcggcttcagcgggattggcgcggcgctgctcggcctgctggcggacacccacggcatcgagtacgtctacacactgtgttcgttcctgccgctggtgggcatcctgacgatcctgctgccctcgaccaagggcgcctgacctgccgatcatcgcctggccgtgtgctatcacccggaatgctctgaaaaacctgcgtgtgcgcttacaatcccggttctaaacgcacaccaggcagacccggcaagacatgacgctcgaccctcccacgattttggcactcaccgttgccctggcagccgctgccgccctgtacctggccgttgaatggcgcagcgtgcgcgaaccttcgctgctgtgctggagcgccggtttcgccaccattaccgtcggttccaccctcgccctgctgcgcctcaatggctacctgatgatcggcatctggttcgccaacggcttgctggtgaccgcgcacttcctgtttttgctcggcgtggcgcggttcacccaaacgcggctgtcgcccatgtggttgctgatgctgctggtctggctgggcatgctgatgttgccggccgatccgtcatggtccaaagccatgctggcggtgcagtccctgttagtagcgctaccgaccctgcgcgccagctttttgctgcggccccatggcaagtcgctgagcatcggcgcggtgcagttgcgctacgtgctgctgatccatggcgcgttctatgtggccaaggcgctgtcggtattgatccccggcaccttgatcgacctcgccgccttcaagggcgagatcatccagatttccctggtggaaggcgccatggcgatcatgctcatcgcactgtcgatgaccggctccgagcgctatcgtcgcgaacaacagatcgcccgcctcgccgcccgcgacccgctcaccgccctctacaaccgccgcgccctcgacctgcgcgccccgcgcctgctcgctcaggtaacgcccgcacaaccgggcgccctgctgctgatcgacatcgacaacttcaaatcggtcaacgaccttcacggccacactgccggcgaccgtctgctgatcgccctcagcgaaatgatccgcagcgtagtgccccaaggcgcgctggccgcacgcctgggcggggatgaattcgtgatcctgctcaacccggcgtccaccgaacagatcgtcgaactgggcagcagcctgcgcgaccagttccagcaactggccgcgcagagcttcaccacgccggcgccggtgacgctgagcattggcgcaaacctgttcgaccaaccgccgccgagtttgacggcgctgatcgagcaaggggataccacgctgtatgaaaccaagcgcggtgggcgggacagtattcggttggtggatcggacggggtcgagttcgtacggctaaaggtcgtaactcaccgccacactgcgcccggtcctcaccgactccaacgcacactccgccaaatgcaacgcatacaacccatcccgcacgctggtgggcaatgccgtgccgttattcagcgcatcgatgaactgcgccagctcattgcgatacgcatccgcataccgttccaggaaaaagtgctgcaacggttccagcgcctcggtgtgttccgcgctccagtggcgcagggtgctggggcggtggttgtcggtgagcagcacgccggtggcgccggagacttcgacgcgctggtcgtagccgtacaccgcctggcggcagcagttgatatggcattgcttgccggaggcggtgcgcagcagcaccatcacgctgtcgtagtcgtcgatttcggccaggctcgggtcgaccaggcggctggcgatggcgctgacttccaccggctcttcgccgagcaggtggcgggcggtgtcgaaatcgtggatggtcatgtcgcgcaggatgccaccggagtgggccaggtagtcacgcggcgccaggccggggtcgcggctggtgatgatgacttggcgcaccgcgccgatctgcccggcgtcgagggccgcgcgcaggcgcagcatgtcggggtcgaaacggcggttgaaaccgagcatcacgcgaccgccctggcgctccaccgcctgggcagcactgcgggccttggcgatatcaaggtcgatgggcttttcgcagagcaccgccttgcctgcggcgacggctgccagcagcaggtcgatatgcgtgtcggtaggcgtaccgatcaccacggcgtcgatgtcattacgggtgagtacggcggcgcaatcgtaggccgcctcgcaccccagttgggcactcaacgcatcgacgccttcgcgccaggggtcagccaccagcaccagcgtggcattgggatgggcggcgacattggcggcgtggatcctggcgatgcgcccggcacccaggacggcgattctcagcatggtcgaactcctgatgttgttattgagggagtaatcagtcgggcaggttgaacggcgtgacgatctgcacctgggacggtgcaatcggcccggccttccagagccggtggtagtgcaggatgtgcaggaacacgtggcgggcatcgatctgcaggttgtgatcgataatcgcggcgaccttttcttcgcgcagcaactggcggttttcttcgtcgaggtcgtggccgatgaacacctcaaggggccgatcgaaggcggcgaacgcatcgacaatcgcgcggttgccgccgccgacgctgtacaccgccttgagctcgggatgctgttgcaacgcctgggtcacccgctcgaaggtgcggtcgtacacgccgtagccgccactgacgtcgagcacccgcaagtgcgccgcacgcccacgcagccaggcccgaaagcccatctcacgctcttcttcaccacggaacagttcgctgccgatcaccacggccacgtcctgaggctgcgccggcagccaacgcgacatcaggtaggcggcagtctggccggcggtgcggttgtccatgccgacgtagccgatgcgctcgctttgcggcaggtccgtgaccagcgtcaccaccggaatccccgccgcgatcagttgcttgaccgccaggttcaccgccggctcatcggcagccttgagcaccacgccctggctgccggtgtccaggcagcgcagcagttggtcgtgcatggcctggggttcgatctcttcaaacaggtgaaagcgcggggcaatgcggaacggcgccaggctgcccagttgcgcgttgatcgccgtctgtaccgccgtactgaagcgcttgggcgtgtgcatgatcacatcgacgtggaacgtgcgccctaccgccaggccgtttttctcctgggactccagctcctccagcgcctgctcgatacgccgccgggtctgggcatgcacgctgccgcgctgatgcagcacgcggtcgaccgtagctttgctcacaccggcctgggtcgccagttgcttgatggagaagtgtttggcgcgttcgagcatggggcctcacttgaggtatttttgaggtgttttttgggtattactgaggttttgcaatgctagtctcagttttgtccggcgtcgagccgggcgatgaacaacaacaaaagttccgggagaactgcatgcctaacaccgatctcgccacgtcgttcagcggccaatattttgtcgtcaccggcagcacccagggcctgggcgcggcggtggcccgtaccctggcaagccgtggcgccgccgggctgatcatctgcgggcgtcggcgcgcccagggcgaagagcaggtgcggctgttggcccaactggattgccaagcgatatttgtcgaggcggacctggagaaggtcgaggactgccgcgcaatcatcgatgccgcgcgtatccatttcggcaccctgcatgggctggtcaactgcgccgggatgtcggatcgcggcaccatcctggatacctcccccgagctgtttgatcggctgatggcggtgaatgtgcgggcgccgtttttcctgatgcaggaagcactgaagctgatgatcagcaacggggtagaaggcgcggtggtgaacatccagagcgtcaccgggcatggcgggcaatccttcctgagcgcctatgccgcgtccaagggcgcgctggcgatcctcaccaagaacgtggcgttcagcgccctgcgcaatcgcatccgggtcaatggcctgaacatcggctggatggacacaccccacgaagatgacatccagcgccagtaccacggcgcccaggatggctggctggaaaaggccgaaagcgcgcagccgttcgggcgtctgctcaaacccgaagaagtggcgcgcagcgtggccttcctgctgtccagcgagtcgggaatgatgaccggctcggtgatcgacctggaacaaggcgtggtcggctgtaccgacggcggcagcccgcaaccgaatcaggcgctgggaggtgtgtgatgtcggcgttcgtgacggaacaggccgtgcgcctggcggacttcagcgagatctgtgcgcaacgcgtgagccgagaggattaccctctgtgcgctgaagttcagagcaatgtgccgatctatcaggcccacaccctgcgcaatagcgaccgcctggcggtgatgaatgaactgcaccgcctgttccgcgaggggcctggggtgatggtggtgcgccgggcctacgaagatctggaagtggtcgaccgccacagccaggtgttcgaggcgatcttcgcccaagaggcggcgcagggcgtggcagccgaccactttgccaaggccggcagcaacgggcgcatctggaattcattgcagaaagccgcgttgcactcgccggcgtcgtttgtggagtactacgccaacccgctgctggggttgatcgccgaagcgtggctggggccgagctaccaggtcacggcgcaggtcaacgtggtgcatcccgctggccaggcccagcaaccgcaccgtgattaccacctgggctttcagaccaatgatgtagtggagcgctttcccctgcccctgcacctgctgtcccagtacctgacgttgcaaggcgcggtggcgcactcggacatgccgctggaaaccggcccgacccagttgctgccgttttcccagcaatacgccctgggttacctggcgtggcggcgcccggagtttatcgactacttccagcagcacgccgtgcaactgccgctgcacaagggcgacctgttgttcttcaacccggcgctgttccatgccgccggcaccaaccgcacaaccgaccgccaacgcatggctaacctgttgcaggtttcctcggcgttcggcaaacccatggaagccctcgaccgcgaccgcatgatgctggcggtgtacccggcgttgctcgagaacaccgcactggatgcccaggccgtggcatcggtgattgcctgcactgccgacggttatgccttccccaccaacctcgacaccgacccgcccttgaagggcctggccccgcaaaccgcgcaacaactgatgcagcaagccctcgacgaacgctggccactcccggactttgccgctgccgtggagcagctgcgaaccaagcgtcaagcgtgaaccctctgtttcaacaacaacaaaaacaacggagcaccctcatgaagaagcaactccttgcgacactcctgaccctggcgataagcccctgggcgctggccgatatccgcatcggcgtgagcatcgcccaggtcgacgacgtcttcctcgcgcagatgcgtgactacatggccgcccacgccaggcaactgcccgacgtgaccctgcaattcgaagacgcccagggcgacgtggtgcgccagctcaaccaagtgcagaacttcaccgcccagggcatggacgcgattatcgtcaacccggtggacacggccgccacgcaaaagatgaccgccaatgcccagcaagccaagacgccgctggtgtacgtcaaccgccgcccggatgcccagcagttgccaccgggcgtggggtatgtgggctcggacgaggtcaaggccggtgaaatccagatgcgctacctggcgcaaaagatgggcggcaagggcaacctggcgatcatgctcgggttgctctccaacaacgccacgcacaatcggacgctgggggtgaagaccgtgctcaaggagtaccccgacatcaagatcgtcgaggaacagagcgcggaatggcagcgcagcaaagcgattgacctgatgaacaactggatcgtatccgggcgcaaaatcgacgcggtggcggcgaacgcggatgagatggcgatcggcgcggccatggcgatcagccaggcgggcatgcagccgggcaaggatatcctggtagccggcagcgacggtggggctgccgggctggatgcggtgaagaaaggccagttgctggtgacggtgtatcaggacaacaagggccaggccgtgggctcgattgacctggcagtgaagatggtgaagaaggagccgtacacggctgaactgaccattccctatcaacagatcacccaggacaactaccaggccttcctcaacccttgagccgaacgaacctgttgtggcgagcgggcttgccccgcgttgggctgcgaagcggcccctttcaaaaccgctgcggtgtttcagttgaaccgcgacatcagttattggggctgctgcgcagcccaacgcggggcaagcccgcttgccacaacaggccctctcaccagagggagtttgcctcaaccggtcttctcgctgaacggttcaagcccattcaccaccagataaagcaacggccccaccgacacaaacaccgccgtcagcacaaagtacggcaccaccgaaagtaccgaacgcccccgccgccgcgcatcccggtacatccacacgcacgccagcagcgccatcaaatacaggtcgatcaccacttgcgcggtgtccggtcgcgacatcaattcgcgcccgaacgccagcagcgactgctcggccgtcagcagcgtgaacagggtgtatgacgaaaacagcagcaaaccgaccagcgcaacacgggatcttttcatgggttgttccttggggtgatcaaggcccacgttagtgataaggttcggcccctcgcaatgacctcggaggtcatgattccgccatggacacccctgccaccgccggcgaacagctgcgccacttgcgccggcaagcccggctcagccagctcgacctggccctgatcaccggggtgtcccagcgccacctcagttgcctggaaaccggccgcgccaagccaagcccgggcaccttgcacaacctgctgacggcactggaggcaccgctggaccagcgcaaccgggtgttcctcgccgccggctacgccccgcgctatagcgccacgccactggcctcaccggcgatggccgcgattcgcgaagcggtcagccatgtgctgcacgccaacaaccccgcgccggccatcctgctggacagccagtggcaggtgttggcggcgaatgccagcaccgccgtgctgcttgaactggtgggcatcccgcccgattcagccgagggcttaaacctgctcaccacgctgttgcagtcgggcggcctcggcgatcacctgaccaatgccgacgagatccgcaccctggcctggcagcgcgccacccgtgaggcgctgggcaatcctgaactggccgccctgctggcgcgtttgccgacgccggccagcaccgagttgcccgccgacatgccgccgctggtactgacgcgcatccgttcaagccggggcgaattgagttttctgtccaccttcaccaccttcggcatgcctcaggacattaccctctcctccctgcgcatcgaacatctgattcccgccgacgacgccacctggcaggtgatgcgcgcggcctatgcgagttatgccgcgctggttttgtgaaatatctgtacgtagactgccgccatacccccacctgaaggcggcgaaaaaaacgtgatgcaagttaccgaagtctccattgcccaattgcgcgcggcgcttgaatccggccagaccacggccgttgaactggtaaaagcctacctggcgcggatcgaggcctatgacggtccgcacaccgccaccgccttgaacgccgtggtggtgcgcaaccccgcagcgctcgaagaagccgaggcgtccgatgcacgccgggacaacggcgaaaccctggggcctttggatggcattccctacaccgccaaggacagctacctggtcaagggcctgaccgcagcgtccggcagcccggcgtttgccgacctggtcgcccagcgcgatgcgttcaccatcgagcgcctgcgcgccggcggcgccatctgcctgggcaagaccaatatgccgccgatggccaatggcggcatgcagcgtggcgtgtatggccgggcggaaagcccgtataacgccgactacctgacggcgccgtttgcttccggctcatccaacggagccggcactgcaacggcggcgagctttgcggcgtttggcgtggccgaagaaacctggtccagcggacgcggcccggcgtccaacaatggcctgtgtgcctacaccccgtcccgtggggtgatttcggtgcgcggcaactggccgctcacgccgaccatggacgtggtggtgccgtacgcgcgcaccatggccgacctgctggaagtgctcgacgtggtggtggccgaagacccggacacccgtggcgacctgtggcgcctgcaaccctgggtgccgatcccgagcgtcacctcggtgcgcccggcgtcttatgctgacctggccgtgactgccgaatccctcgccggtaaacgctttggcgtgccacgcatgtacatcaatgccgaccccgacgccggcaccagcgaaaaacccgggatcggcggccccaccgggcagaagatcaacacccgcgccagcgttatcgacctgtggaacgacgcccgccaagcgttggtggcggccggcgccgaagtgatcgacgtggatttcccgctggtgtccaactgcgaaggcgaccgccccggcgcgcccactgtgtttacccgtgggctggtgtccaaggagttcctgcacgatgaactgtgggaactctcggcctgggccttcgatgatttcctgcgcgccaacaacgacccggcgctcaaccgcctggcggatgtggacgggccgaagatcttcccccacgacccgggcaccctgcccaatcgcgaagacgacctggccgccggcatggacgaatacgtgcgcatggccgagcgcggcatcaccccgtgggaccagatcagcaccctccccgacggcctgcgcggcctggaacaaacgcgccgggtcgacctggaagactggatggacaagcttggcctcgacgccgtgctgttccccaccgtggccgacgtaggcccggcggatgccgatgtgaacgaagcctccgccgacatcgcctggagcaacggcgtgtgggtggccaacggcaacctcgccatccgccacctgggcgtgccgaccgtcaccgtgcccatgggcgtgatggccgatatcggcatgccggtggggctcacctttgccgggcgcgcctatgatgactctgcgttgctgcggtttgcgtcggcgtatgagtcgaccggcagcaagcgcctggtgcccccgcgtacgccggcgctttaactcaaggcatgggcacggcaatcaacaggattgccgtgccatgggccagcgtcgccgccagcacgccataacgcatacgcaccagcgcgcaagccagcccttccagcagggtaaacagcaacaccggccaccccagttcagtcacgctcaaggccaggaaagcatggcaggccgcaaaagctacgccgctgatcagggccgcacgcaacggcgctacctgctgctccagatagccctgcaaaaacccacgaaacaacacctcctccaacgcattggcgccataggccaacacgaccatgcccggcagccatacccaataacccacaagcgctgacgcttcgatgccctggtacaaccgcagcggcacaccgatcaagccaccaaccgcgagcccgatcatcagtcccgcgacacgcggccccctggaccagacgatcagcgccgccaagtcaggtgccacccgcacaagcgccgtaatcaataacaccgataaaccacccaatgctgccagcaccaaggtgttggccgtgaaggcaagctgcacctcgctgcccagcgaccacaagcccaacggcgtcatcacatcgcgcatcagcacgaacgccatcaacagaatcaggatgcgcaacgccgtcagcgacttgggcgtgagcgcgaaccacaggccgaacaacagcagccccggtgccaggtacgtgctgtagtggatcaataccaccatgccttgggtaatcatcgatcgctcagccgtgcgccagcgcaatcatttcgatctccaccgccgccgacttcggcagctgcatcacgccaatcgaggtccgcgtatgcaccccggcgctgccgagaatctcgtgcaacaggtccgacgcgccgttggccacttcactctgctgatcaaaatcctcggcactgcgcacgtacacggtgatgcgcgggatggccttgatctggtccagcgaacccagggcctgctggagcaaccccaggcagcgcaacgcgctgatgccggcggcgacttgcgcctgggcgagggtcaggctgtcaccgaccttgcccggcagcacgatggcatcgccgacacgcgggatctggccgctgatgtacaggtggttgccatcgcggaccagcggcgtgtagttgccaccgatcttgaattcattcaactgatagccgatgcgcagctgggcggcctggtatttttcgtcgcgggtcatgggcgtgcatcctcgttgcgacgttgccactcatccaccacgtcgcccagggtcttgggcctatcgttgcgaatccaggccatgaagggccggtcgaacttgaaccctgggccgcagtgctcaagcatgaagcggcgaacgttctgagtgtttttgtagtggggggtgacgggggtgtcgcgggtgatggggtcgctgtgccagtcaaaatccatgttgtctctcgggcgccgtggggtttcggcgctagcatagcgatgtgctacctgcacaggaagtgagctgtgattcaactgatgtgttgagacatcgcacaagataaaggcttgcttatattgccttaaagcccagccctttcaaggtctttgaaaaaacggccatacctgcctgataccctcccatcaagggtgaacactacaactgtggcgagcgggcttgtcccgcgttgggctgcgaagcagccccagcaccagcggcctaagaatgcctggttcagcgcatttccccttccagggtcgcttcgcaacccaacgcggggcaagcccgctcgccacagaagactcatcgcctgttctatctgaagaccttgaaagggctgacctcagtgccgaaacttttctggatatttcaaaatttcactttccttccccctctgaaatattgcatggttgtacgacgacttaccccgtcgtgccagcccccaacaacaataaggaaacacccatgcaaaacgtcaaagtgctgatcggctttctgtgcctgttcagcggctatgtcgcagcagcgcctgcccctgccgaaaaggacgtggcccaagcggtcgaccaactgacccaggccatgctgcacctggacctcaagcaacttcacgcgctgacgtccgacaagctcacctacggtcactccagcggcaaggtgcagaacaaagaccaattcatcgctgacctggaaacccacaccagcgcgttcaagaccctggaaatgcagaaccagaccatcaccctgcaaggcgacactgcactggtgcgcaaccacttccacgctctggccgttaacagcggtgtagaagtgcccaccgatatcgacaacttccaggtctggcagaagcaaaaaggcaaatggctgctgatcggacgccaggcctacaagtactgatgcccagcggtgagccgctgaccccggctcaccacgccaccaccgtgcgcaccttcaacaacgcctcacgcagcgccggcagcgccaccgagcccaaggccaaacgcaacgcatgcggcacatgggtcgacacggcaaatggctcggcggtagacacggaaatgccctcgcgctgcaagctcatggccacctgatcggcccgcgcctcgtccgccaggggcaaccacaggaaatacgaagaaggatggctcacgtacgccagtcccttcagcacctgcgccgccaaggcctgccgcgcctgggcatcctggcgcttttgtgcttccagttgcgccaccgtgccatcctccagccaggccaccgcaatggcgctcatcacacccggcacgttccaggtggtggccatgagggtgcgctccagtggtttcacccattccatcggcgctgcgacaaacccgacccgcaacccggtcgcgacacttttcgacagcccgcccacatacaccgtgcgctccggtgccaatgtcgccagcggcggcggcgcgtcttcggccaggaacgcgtaggccgcgtcttcaatgattatcaggttgtgctgacgggcgatcgacaccaactgctcgcgctggctcatgcccatcacccagcccaatggattgtgcagggttggcatgctgtacaccgcgcgcaccgggcgcttgcgacacaggttgtgcagcgcgtccaggtccggccccaccggcgtgaccgggatcgcgacgatttccaggtgcagggtttcggccagcaccttgaaccccgaataggtcaaggcatccaccgcgatcacatcgccgggcttgagcaacgccatcagcgtcaccgccaggccgtgctgggcgccactgaccagcagcacctgctcggcgtccaccctgagcccgcgactgagtaagtgccgcgcaaccgccgcgcgctcatgcaagcggccggcatggggctggtaacgcaacagggcttcgaggtcgccgcagagcgccaactggcgcagcgccgtgcgcaacctatccgcctggccgggcaacgaagggtaattaaagttcaggtcgagcatgcccggcgccaccgtcatctgcccactgccctgccccggcggcagcgagatttcgcgcacgaaggtgccgcgcccggcttcaccgctgaccagccccatcccctcaagctccgcatacacccggctggcggtgactagggccaggccatgctcggcggccagttgccggtgggttggcagccgtgtgccgggcggcattgttccgctgcggatggcttgggcaaaggtatcgaccaacgacttgtagcgggcgcggggcattgggctgtatccatgacaattttttgattgtattaatcctcacctctaggatggctgcaacgcaacccctccttgtccggacgcctgatcatgcaacgcacctcctctcttgacaccctgaatggcagcgcccaaggctggatcaacggctttatgggcgtggtgatcttcagtggctccttgcccgccacacgcctggccgtaatggagttcgacccggtcttcctcaccatgattcgcgcggccatcgccgccctgctgggcgtactgctgctgtggctgttcaaggaaaaacgccccacacgccagcagtgggtgcccctggcaatcgtcgccctgggcgtggtgatcggcttcccgctgctcacggccctggccctgcaatacgtgacctcggcccactccatcgtgttcatcggcctgctgccgttggccactgcggtgtttggtgtgctgcgcggcggcgagcgtccgcgcccggtgttctggctgttttcgatcctgggcagtgggctggtgatgggttatgccttcgcccagggtttgagcgccgcaccggccggcgacttgctgatgctgttggcggtgctggtctgcggcctgggctatgccgaaggcgccaagctgtcgcgcagcctcggcggttggcaggtgatctgctgggcgttggtggtgtcaatgccggtggtggcgccgttgagcctggtgctggcgccgacaagtttgcacggcatcagcctgcccgcctggctcagcctgggctacgtggcgttgttcagcatgctgatcggttttgtgttctggtatcgcgggttggcccagggcgggatcgccgccgtcggccagttgcaattgctgcaacccttcttcggcctggcgctggcggcgggcctgctgcatgaacacgtcagcctgggcatgctgctggtcaccgtcgcggtgatcggctgcgtggccggtgcaaagcagtttgcccgctaacgctgcggcgcgaccatcttgaacttgatgttgatgtcattggacaccacgctgttgccggcccactcgccctcgccgatcctgaagtcgccgcgcttgaggatgaactcaccgtcgaacacaccaatgccgctctgctccttgagcaccacgtcgacgtccaccgggcgcgtggtgcccttgatggtcaggttaccgctgatctggtagcggttattccccaacgccttgaccccggtggattcatacacgcccaccgggtaggtcgcggtatcgaaccaggaggcgcgttgcagttcgtcgttggcatccgggctgccggcgtcgatgctggcgagctggatcttgagcaaggcatgcccggcttccggctgttgcgtatcgaaggtcaaggtgccctcgaagtcgctgaacgtgccatacacccgctgccccaattgcttgtaggtgaagctgatctggctggcggtgcggttgacgtccttgtactccaccgcctgggcgctggcgccgtaggcaaggatcaaggccaggacggcgaccggggacattcgacgtttcatgcaacgctccgcgacaggtaagaacacagtatcgagctaacacctcataccagggatttattcccatcgggcgtttgtcctgctaaacagagtagtcgccccacaacaataaggacgctgcatgcacgccccatcgctccaggacaccaccgcgccggaaggcatctgctacggctgcggcgccagcaacccccatggcctgcacatcaagagccgctgggacgcggacggtatccacctggtcgccgagcacctgcccgaggcaaagtacaccggctggcccgacctggtctacggcggcctgatcgcgatgcttgtggactgccattccaactggaccgccatggcctaccattaccgcgccgaacaccgcgaacccggcagcctgccgcgcatcgattgcgtgaccggcaacctgggcatcaagttcatcaagccgacacccatgggcgtcaccctcaccttgcgcgcccgcgtcgacggcgacgtggggcgcaagacccgcgtgatctgcgaggtgtacgccggtgacgtgctgaccgccgtgggcgactcgatcttcgtgcgcgtcgacaccgaccaactggccgctgccgcccatggccgtgacagctgatcctggtctacattgatggccaccgttaatcgaggactgcaccgatgactcatctcaccgcgaaagactttgcgcccgaactactggagctctacgacggctacgcccacggcaagctcaaccgtcgcgaatttctcgaccgcgccgccctgttcacctttggcggtctcaccgcctcggccctgctcgcagccctgagccccaactacgccctggccgaacaggtgaaattcaccgacccggacatcgtcgccgactacatcacctacccgtcacccaaaggcaacggcagcgtgcgcggctacctggtgcgcccggccaaagcggcgggcaaattgccggcggtggtggtcgtccatgaaaaccgtggcctcaacccctatatcgaagacgtcgcccggcgcctggccaaggccggctttatcgcgctggcgccggatggcctgacctcggtgggcggctaccccggcaacgacgaaaaaggcgtggaactgcaacagaaagtcgacccgaccaaactgatgaacgacttcttcgccgccatcgaatggctgatgcaccacgacagcagcaccggcaaggtcggcattaccggtttctgttatggcggtggcgtgaccaatgcggcagccgtggcctacccggaactgggggcggccgtatcgttctacgggcgccagccggaagccaaggacgtatcgcgcatcaaggcgccgatcatgctgcattacggtgagctggacacgcggatcaatgaaggttggccggcgtatgaaaaggccctgaaagcagccggcacaacctatgaggcgtacatctacaagggggccaaccacggttttcacaatgattcgacgccgcgttatgacgaagcggcggcgaacctggcgtgggaacgtacgctggggtggttccgcaaatacctggcctgactgccccctgtaggagcgacctcagtgttccagtgcatagcgccggcaatggttgaggtagccctgctcatggctccctaccagttgcaccacgctggtccatagccacgacggcgcatccagctgtttggagcggttctcctgcaataccgccatccagtccttgcgtgtatcgcgatccatctgccgggcatgggcgataccgaccacccgtgccaggtaaccggcggcgtgcatggcgtcgatctcgctcaactcgtccagttccagcttcatatcctggggcaacagttcacggatgaaaaaaccattgtccagcatgcgcgtcgccaccatgcgttcacccaaaccaggcgacagctggcgggcgccctccaccacccggcggccattgtcccggggcatcttcgcccgtgccgcacggggcgccgccgcgccgacggcctgtttgatatcgatcaggcaatattcctggtcatccttgtcgcccacgccgagcaaggcggcataacgctgcaggcccagggagctgcagcccttgacccaataggccgagtccagcaactcgaccctggcgtccttggggcggcctttgagtgacgtcaccaattgatggatgtcggccgaggcgcagagcgtttccagtgcggttttttcggcccgtgacagcgaccagaaatgcttgcccaagggaatgctcgggcgagcattttcgatgcgctcacgcgccaggttcttccaggtgcgctccaccgcgctgcgcatgcccgccttgacctgggacgggcgcggcggcgcggcgtcgggcttgtctttgaacgcctgttcgtagcccaccatcatttcttcgagcatgcgcgcactggtaacccccggcaggtccgagccgcgcgcagcggtggccagggacagcgccaggcgcaccaggtcgtgggccgggttgccgatcaccgtctggtcaaggtcgcggatatgcatatcgatgcggcccttgatatcgccggtaggccccaggttgccggcgtggcagtcgccgcagatccagatcgccgggccatggggcaagcggcgcccgctctggctgtgcagccattcgtagaattgcacggtgctgccgcgcacgtaggcgtgggcagagcgggccattttcaggttacgtagttgggtcaggtgcggcaggcgggcggaggggcgcggtatcttcatggaaaaactcagtgcaggtgttgcgatagagcgctggccctcgacaaatgtttcattatgtttcaaaaaaaaacgtttcaatcttccgcagccatgtcccgcaaccagcctttgaacgccagcatcgccgccgtctcggctcgcgactgcaagcgcgtcaaccagtaactgccggtggtgatgccgacatcgaacggctggcgaatcacatcactctccagttgccgcgcaaacatcatcgccggcgccaaggccacgccgaggccttgcaaggccgcctccatcatcgccagcgaagaatcgaacacaatgctgcgcggcagcagggtatcggcgggcaagccggcggcctggaaccacaggttccactcatcggcgcggtaggagcgcagcaaggtgtgtttcaagaggtcggccggtgcgcgtaattgctcggccagttgcggcacacatagcacgctgagcggagcttccagcagttcgcaggcatccgtgccgtgccaggcgccggcgccgaaacgaatggcgtaatccaggccttcggcggccacgtcgacacggttgttgtgggtcgaaaggcgcaggtcaataaacgggtagcgctgctgaaaatccgccaggcgtggcagcaaccagccgaccgcgaaggtgccgaccgccccgacggtaaggacctcgcggtagtgcccgccctcgaactgaccgagggtgtgagcgatgcggtcgaaggactcgcgcaacaccggcagcagggtttcaccttcacgcgtcagcatcaggccgcgtggcaggcgcttgaacaaggcgacattcagttgcgcctccaggcttttcacctgatggctgaccgcagcctgggtcacgcacaactcgatggctgcccgggtgaagctcaagtgccgggccgacgcctcgaacgcgcgcagggcattgaggggcaaatgggaacgcagcatggtctaccctagattttctaatggcagctgcaagatatcatcgtttgccgaagggaccgaacctgactagatttgccacgcctgcgcaggccccgatcgtcagtgcatcatttacatggaagcgaataaccatgaactccaacgtaagaaatttcctgatttcagccttatttatcagctccggcacctgtatggctgccaccgacctgcgccaggtcgtggacagcagcgtcgagcccctgatgcagcagcaaggcatcgccggcctgtcggtggcggtggtgaacaagggcaaggtgcaatactttaactacggcgtcgccaacaaagacaagcaacagcccgttaccgaagacacgctgttcgagatcggctcggtgagcaagaccttcaccgccaccctcggcggctacgctgcggccagcggcaagctgaagttgtcggacatggccagccagcatctcgccgcactcaagggcagtgccttcgaccgcatcagcctgctgcaattggccacctacacccctggcggcctgccactgcaatttccggacgccgccgacagcgccgacaccatgctcgaatatttccagcactggaaacctgtctatgcgcctggcgcacaacgcctttactcgaatcccagcattggcctgttcggctacctcagtgcgcaaagcctgggccagccgttcaacgtcgccatggagaaaaccctgctgcccaagctgggcctgaaaaacacccatgtcagcgtgccgccagacaaaaaccagacctacgcccaaggctacgacaaggatcagaaaccggtacgcgtcggccccggcgcgctggacagcgaagcctatggcatcaagaccagcagtcaggacctggcgcagtacgtgatgctgaacatgcacccgcaaaccctggagaaaccgctgcaacaggccatcgccaccacccacaccggttactacacggtgaacggcatgacccagggcctgggctgggagtactacccctacccgatcacgctgcaagcgctgatggaaggcaactccacaccgatggccatggagccgcataaggtgaaatggttgaccccggccccggcccaggtgcaaccggccaacgtgctgtacaacaagaccggttcgacccgtgggtttggcgcctatgtggcctatgtgccgagcaaggacatgggggtggtgattctggccaacaagaactacccgaatgccgaacgggtgaaagtggcccatgcgatcctgagtgcgctggaccactgatgcacacgccctgcaggagccggctggcgggctcctgcaagttgggttacatcccgagccagtgcggcaacgccagcgaaatgaacggcaagtacgtgaccatgatcaggaacaccaacagaatcatcagccacggtagcgccgcgcggatggtctgccccagcgtcaacccggtcaccgccgaggtcacgaacaggttcagccccaccggcgggtgcaccaggccgatttccatgttcaccaccatcacgatccccaggtgaatcgggtcgatacccagcttcatggcaatcgggaagaaaatcggcgccaggatcagcacgatggccgacggttccataaagctgcccgccaccagcagcaccacgttgaccatgatcaggaaaccaatcggcgtcagcccttcggagatcacccatgcggtgatttcctggggaatctgctcggtggtcagtacatgggcgaagagcatcgcattggcgatgatgaacatcagcatgatcgccaggcgcccggattcgagcagcaccttgggacagtcgcgcagcttcatgtccttgtagacgaacaacgccacgaacgccgagtacaccgccgccaccgcggccgcttcggtcggggtgaacatgccgctgtagatgccgccgaggatgatcaccagcagcaacaggccccagaaggcgcggcgcgcgcaggtcagccactcgcggaacgtggcccggggctgggccggcagcttcttgatgcgtgcgacgatgtagatggcgatcatcagcatcaggcccagcaacaggcccggaatcaccccggccatgaacagcttgccgaccgaggtttcagtcgccgccgaatacaccaccatcacgatcgacggcgggatcaggatgccaagcgtgccggcgttgcagatgatccccgccccgaactccttcgggtagccggaacgcaccatgcccgccacggcaatcgaacctaccgccgccacggtcgccggtgacgaaccggacagcgccgcaaacagcatgcacgccaacaccgccgcaatcgccaggccgccacggatatgcccgacacaggcgttggcaaaatcgatcaggcgctgtgccacaccgccggtggtcatgaacgcgccggagagcaggaagaacggaatcgccaggaaggtgtaggcgtcggacgtctcgaacagcttgatcgccagggagctcaccgagtcctggctgaacatcaggatcgacaccgcaccagacaaacccagggaaatcgcgatcggcacgccgaggaacatgaacacgaacaacaacagaaacagacagagcacggccatcagtgacgctcctcatggctgccggccaacttgctggcctcaccggcctcatcagccagccctaacccgacctgacggtgggtaaagatgcggtagaaaatttccaggtagcggataaacaccatggcaaaaccaatgggtacgatgatcacgatgtcaccgacgtcgatgccgtactggtcgaggtcttctgcgccgatatgcgcggtcatcaccgcgctgacccacttgtagctggcgatcatgaacagcccggcataggccaggcagcacaggcaggcaagcatgcccagcaagcgttgcaccgggcgcctggtcagcttgaccagtgcgtccacgccaaggtggccggcggtgcgcacgccgtaggaaataccgaagaaaatcagccagccgaacatggccttggtcagcgccacgctccaggtcatgtcctgggcccaggtcatggtgtggtcgcccagggcgccgaagaaggtgctgctgaaggcccacttgtcagacagggcaaagaacagcgtgtagatgttgttgagcatgacgtagacaaatgtcaccagggtcatggcggccagcaggaaggcgatgaaaccttcctccaggtgctcccagacgcgccttagcgtttgcatggcaaaacctcgcgaaagcaaatgagatgtcagggtgaaaaccggatcgataggtgggagggggcttgcccccgatagcggtgggtcagagacagatgagcaagctgacacaccgcaatcgggggcaagccccctcccacactgggggattactggttggacgcgtccgccgccttgatcaggtccgcgccgatctcaccctcgaacttctgccacaccgggcgcatggcttcgcgccacagctggcgttgctccggggtcagttcgatgatttcgctggtcttggcgtcgacgatcttctgcttggccgactggttcagcgcttcggcctgtttgttcacctcgacggtgacctcgaccatgatctgctccagggtgctgcggatgtccggtggcaggccgttccagaacttggcgttggtgatcaccatgtagtcgatcaggccatggttggactcggtgaagtacttctgcacctcgttgaccttctggctttcatagttcgaccaggtgttctcggtgccgttgacggtaccggtctgcaggccctggtacacctcggcgaagctcatcttgcgcgggttggcgcggatcgccttgaactgctcttccagcacgctggaggcctgtacgcggaacttcaggccacgggcatccttgggttcatgcagcgccttgttggccgacagttgcttgaggccgttgtgccaataggccaggccgaggatgttcttatcctgcatcgaggtcagcagcgccttgccctgggccgcctggaagcggtcaacggcggccaggtcgttgaacaggaacggcaggtcatagatctgcacctgcttggtgtattgctcgaacttggccagggacggcgccagcatctgcacgtcgcccagcagcagcgcttccatttccttgccatcgccgaacagcgacgagttcgggtacacctcgaccttcaccttgcccggcaggcgttcttcggcgagcttcttgaacaacagcgcgccctggcctttgggggtgttttcggccaccacgtgggcgaacttgatcacgatcgggtccgccgcctgggctaggcctgcggcaaacaaggtggcggcgcacagcagcgcccgggagagcttgagcatggaaaatcaccttcttattgttgtgttgtaaggcaaggtgcctgatgtgacgcgtgtagtgaatttcgaattttagatacctgcgttcggcgtggccgaacgctacgcctgggccgccaacaacctttgcgcgcgcagcaacaccggcgcatccaccatctgcccatcgatctggtaggcccctgccccatgggcgccggcgtccaccacccgctgcgcccaagccaggtctgcggcgctcggtgcgagcgctgcatggatcaccgccacctgcttgggatggatacacagcgccccggcaaagcccatttcataggcatgccggatcgaacggcgcaggccttccgggtcatcgatggccgggtgtacaccgtccaacggcgcgaccagacccgccgcccgcgaatgcacaatcagcgccaggcgcgcctggtccagggcgaactgcgcagccgcggagttgctgctcaggttcaggtccagcgccaggtccagcccgccaaacgacaggcgctgcacctgtggcgcatgggcgatctcggccacggccagcaagccacgggcgctttcgataatcggccagatcactttgccggtggcggcaaccaccgccacttgcgcggcactttcaaccttgggtagcaatacccccgccacattcggatgggctttgcagaacgccacatcctcgaaatgctcggcatgctccggcgcattgatgcgcacccacacctgggcagcggggttcgccgtcaggaacaccccgaggttatcccgcgcctggcgcttgagcggttcttcgaccgcgtcctcgaaatccacgatcaccgcatcggccccactggccagggctttggaaaatcgttccggtcggctaccgggtacaaacaacgccgaacgcaccaatggctttggcatcacagaattccttatttagataacgccgcgtgcacgcaggctgtcgatggcatcgccggagtaaccgagccggtcgagaatgccctggctgtgctggcccagcgccggaacgccgtccatgcgcggggtaaacgccgcattgcgggccggcggcaacagcgacggcagcggaccggccgggctatcgacctcgcgccagctgtcacgggccttgagttgcgggtggtcccatacgccctgcatatcgttgacccgggcgctggcgatctgcgcgtcctccaggcgttggatcaccgcctcggcatccaactgcgcaaagctgtcgacgatgatctggcgcagcacctcacggttcgccgagcgtttgaagttggcgctgaaacgctcgtccgtcgccaattcaggcgtgagcagtaccttgtcgcagaacgccgcccattcgcgctcgttctgcaaaccgagcatcaccgtgccgccatcgccggtgggaaacgggccgtagggatagatcgtcgaatgcgcggccccggcacgcggtggctgcggggcgccgtcgaaggcgtaatacatcgggtagcccatccactccaccaggctttccagcatgctcacgtcgatgcggctgcccttgccggtcttgccgcgcagcagcagcgccgagaggatgccgctgtaggcgtacatgcccgccgagatgtcggcgatggagcaaccggccttggccatctggtcgtcgccagggccaccggtcaccgagagaaaaccgccctcgctctggatcagcaggtcgtaggccttctttttctcgtacggcccgccttcgccgtagccggaaatatcgcacacgatcagccgcggaaagtgcgcatgcagcgcctcgaacgacaggcccatgcgcgccgccgcgccaggcgcgaggttctgcaccagcacatcggcgtcggcgagcaaggtgtcgagaatatcgcccgcctcgtcctgcttgaggtccagggtcaggctttccttggagcggttggtccacacgaaatgcgaggccagaccgcgcacgcgttcgtcgtagccacgggcaaagtcgccgacgccggggcgttcgatcttgatcacacgagcgcccaggtccgccaactgacgggtgcagaatggcgcggcaatcgcatgttccaggctgacaacggtgatgccgtccagcggtcttgggttagtcatgacagttcctcagagccagtgggccatggacgtggcgttgcgcaaatcccagaccttgtcgatcagtgcgttggcctgggccggtgtgcgggcgttgctgaattgggcgaggcgctggaatttgtccgccagctccgtgcggctcagggtgttgcccggatcgcccttgggctcgtcgatggcgccgtgcagtgtgcggccatcctgcgtggtgacggtgacacggccgagccagcgttgcgggtaggcgccgtcgacttcgcggtcgaggctcatgctgaccttgtcgcgaaaagccgacacggccgggtcggtcaacgccagctcatggaactcggtgagcccggccttgccgtgtacggcaatcaagcccagcacagtgcccatggagaacttggcctggtgcacgctggccggtacgttcacgcgccccagtacatcgatggcgccctgatgcacgcgggtttccacgcgggcaatatcggcggcggcgagctgttcgcgctgcatcagctccaacagcgcatcggccgcaggatgggtatggcggcacgacgcatgaaacttgaacgaggtctccagcaatgcccagcgactgcccaggccggcggacaacttgcccggctcggcatcactggacatgcccgccgccagcccttggtcgccctcaagaatattgcgtgcaccggtcagcccatccgccgtcaggtaagcggcgagcaacccgtccgctgccgccttggccgtgtgcagctgcttggagtcggcggcatcgcgcaggaactcccacaacccggcggcctgggtgcctgcgctgccgagcaggttgatgaattgttcctggttgaaatccagcaacttgcccaccgccaccgccgccgccagggtgccgacggtggccgtggtgtggaagatgcggtaatgggagcggcccatgaattccccgatgcggatacccgcctcgtaaccggccaccgaggccagcagcaagtcgcgcccggatttgcccaggtcctgggcggcggccaaggcagccggaaataccacggtcgccgggtgcaacacggagctgttgtgcaggtcatcctgctccaccaggtgcgatgaagcgccattgaccaacgcggcgaagtaggcgctgctgctggtgccattgacgatcacctgggccgggccgctgctcggccccatcttccgggcatagcgctcgaacaacggaatcgggtgcgcccctttactcgccagcgccgaggccagccaatccaggtacaggtcttcggtgcgcgcgaggacggtttcgggcaactgtgcgtagtgcagatccgccaggaaccgacataaggcttgggtatggctcatggtcggcccctcagaagctgcgtggcagttcgagcaggtgctcggccacgtaggacaggatcaggttggtggagatcggcgccacctggtacaggcgcgtctcgcggaatttgcgctccacgtcgtactcgcaggcaaagccgaaaccgccgtgggtttgcaggcaggcattggccgcctcccaggacgccttggccgccaggtacttggccatgttggcgctggcgccggcatgcttgccgctgtcgtattcctcgcaggcgcgccagcgcatcaggtctgccgcttcgatctcgatatgcgcctcggcaatcgggaactgcacgccctggttctgcccgatgggccggccaaacaccacgcggtcacgggcatacgcgctggccttctcgataaaccagcggccatcgccgatgcattcggcggcgatcagcgtgcgttcggcattgaggccgtcgaggatgtatttgaaacccttgccctcttcgccgatcaggctgtccaacggcaactccaggttgtcgaagaacagctcgttggtctcgtggttgaccatgttggcgatgggctgcacggtgagcccgttgccgatggcttcgcgcaggtcgacgaggaagatcgacatgccttcggatttcttcttcacctcggccaacggcgtggtgcgcgccagcaggatcatcaggtcggaatgctggacccgcgagatccacaccttctggccgttgatcacgtacttgtcgccgcgcttgattgcggtggtcttgatcttggtggtatcggtgccggtggtcggctcggtcacgcccatcgattgcaggcgcaattcgccgctggccagtttgggcaggtagaagcgtttctgcgcttcgctgccgtgccgcaacagggtgaacatgttgtacatctggccatgcacggtgccggagttgccgccgcagcggttcacttcttcgaggatgaccgaggcctcggccaggcccaggccggaaccgccgtattcctcggggatcatcgccgacagccagccggcgtcggtcagcgccttgacgaaagcctcgggaaagcccttctcttcatcgatcctgcgccagtaggcggcatcaaattcagcgcacaaggcgcgcacgccttcgcggatggcgttgagttcttcgttgtcattcgggttcatctgcggctctccgcctgttgttcttggattattcgaaattcacctgggcttgctgcgccaggccatcgctattgccagcccacagttgggcaacgccggtttcggtgacgcgcccgcccacttcgaagggttgcggcgcaatcaatgggcgcacaccgcgataggcaaaccggcgcaacgtggcgtcgggatgggcgcgacagaacgcacgcaagttcagggtggcgatcagcggcccgtgcaccaccagcccggcatagccttcggtgccggtgacgtaggggtagtcgtagtgaatgcggtggccgttgaaggtcaccgcgctgtagcgaaacagcagggtcgccgtggggtcgacggtttcgcaccactcgccctgctccagcgcctcgccgctgcccgatttgggcggcgtgggttcgcggtagacgatgtcctgttcctcgcggatcgccaggcggcctgcctgggagtagtcgtggcgcacggtgacgaacagcagcgagccagtgcgcccggtcttttcttcgacctgggtgatggtcgacacccgggtcgccgcctcaccggcacgcagtgcatgcaggaactcgatgcgcccaccggcccacatgcgattgcggttgtcggccggcggcaggaagccgccacgggccggatgaccatcaccgcccagagcggtttccggcagtgggtcctggaagaaacaccactgccacagcggcgggatatccgcgccgtcttcgggcacggcttcgccaaaggtggcggcaatacgcttgagcaggttatggctgaggtggtcgtgggcggtttcgctacggccgatccaatcggtggcgctcatcgggtgcaggtcctcgggcagtgagtgtctgccccggatcatgcaagggtgtacccgttccgggaatttgcatttcaataaaccagcgttcggttatgctgaacgccgccatcctgtcccgggagtcttgcatgcacttcgatctggccgacctgcgcctgtttatccacatcgccgaatcccccagcctgacccagggcgccaagcgtgcgttcctctcgccggccgccgccagtgcgcggatcaaggccctcgaaggccaactcgacacgcgcctgctgtaccgcgacagccgtggcgtggagatcaccccggccggagagcgcctgctgcaccatgcacggttgatcatgcgccaggtggattacctgaagagcgaattcacccaatacggcgtggattcggccgggcatatccgcatttttgccaacaccacggcggtcaccgaattcttgccggaggtgctggcgggcttcctgtcccagcgccccggcgtgaccgtcgacctgcaggagcgcctgtcccgcgacatcgtgcgcggcgtactggatggcaccagcgacatgggcatcatcgccggccccgtggaagcctcggggttgcaggtactgcacttcagcacggataaactggtgctgatggtgccggtggggcatgcgctggcggaacaaccctccgtcaccctggaacagaccctcgcctaccagcacatcggcctgcatgaaggcagcaccttgctgagcttcctgcgtgaacacgtcgagcggctgggcaagcagctgtcgctgcgcatccagatgtcgagtttcgaggcaatctgccgcatggtcgaagccggtgtgggcatcggcatcattccggagtccgccgccgtgcgccacagccgtaccatgcggctggtggcggtgaagctggatgaaccctgggcaatccgcgagcgcagcatcctggtgcgggagctggaggcgttacccggcaccattcgtgcgttgatcgccacgttgatgccggactcggtcagtgcaaactgaggttacgcagacgcgcaccgtccacggtgacatggctcaagcgcccctggtcgtcgaataacagccagccgtcctcggtgcgacggatgttcacttcgtaacgaggccagtgcagcaccgcacacaggtggtcactggcgcgatggataaagtgccaacgcgtgtcgcgttcgccggcaatatagccgaacaccaaccactgcgcgtcgagggcaatgcgcaccgggtcgccgtcgaagaaaccttcgtcacagcccggcatgcgataacccttgcggttgccatcgacatccaggatcagcgtcggctcttcgtcatcgcggcacctgatcccgtactcaatggtttgatcgagtgcacagtacagcgcgtggctttcctgcgactgcgtggacgccggctcacgcccggccaaccgacgctcaggcaagcgatagtgccagcgttcgacaccctcgcgcgggttgtagagccagaggaactcattacgttcgttgcctttgagcgcgcgcagcgcccccggcaagtcgctgacatgccacagggtctgaaagttgcgatccacgtccaccacgcgcagttgccggtcctgaccgagggtccaggtgctgccgtcaaactgctcggcgaacacctccagcacctgcacgcccaggtcggtggcggtacggttgaccaggtcgagtttgctgatacgccatacccggtcacgccgggccagcaccagcgccatctgccgactgtgagccaggacaatccgctgggccggcacggcgaagaggaacagtggctggccgctggcatccgtcaccaccgcaccggcctcgcccagcgccaccaggtaacgctcgtcatccagcgacactgcgtcgtatatcggtcggctaccctgggtcggggcggtccactccagcgcatcacccacccctaccaacgagcgtatggcaggccgcttcagggcctggccaggcaagtctgcctgcaacaatttatcgcggctcatcttgaccagcgcttgcagctgattgaagttcagcccgccgcgaccactgagttggtcggcgatcactgcgtgcacggttgcaccggccagccaactcagggcagcggcatcagatttgtgcgccaacagggcgtgcgccagggcgtcacgctcggcgtatcggtcgggagcgtcgcgcaactgttcgatccacggcccgtaagcttccagggtctgcggcagcagaatcgcgcgtttgaccaaggcccccatcgccagccgcccaccggccgcttcggcatccagcaaccattgcgccgcgcgcgtgcgctcatccggcaggctccacaccacctcgacggcttgcagccacaggcccttggcgatcagcgattcggcccactccaggcgcaaacgctcggcaatctgcggctgcctggcctggagcaacaccacggcatcggcaaacgcatcgtcacgccgcgccaccagtaaggcacgctgccagttctcggccaggcacagcagacgcacgatgaccgccgacggcatgtcccaggccagggccaggtcggcagcctgttggtaacgtgcgtgcttttccaggtagtcgagggcttcctggcgctccttgagcagttcggcgaggacaaataccgcttcttcgatccggttttcccgagccaggcgttcgtatgagcggcgatagacctcgcgcaggtgctcggtcaggctttgttcgaagtggtaggcgcggcctggcccgctctgctggctgagggtcaggtcgtcgcgccgctgcggcgtaccgaagttctgttcagcatccggctcctggcctcccagaggaatggcatggcgcaaggcttcggcaaaatcaccgtcctcgaacatctccagcatgcgctgcatgtaggcggcctggcgtttgccgtagagcctggacagttttgaaagctcggtcagacgggtcagccaacggcgccaggcggacggtttaagccgagccggtgtggcccgctcggcgatgcccggatccgccggtgccgaaggcgcggcgccgacgggctgcacgcctcgacgcaggtatttgttgatgcccatcaacaaggcagtgaacaccgttgcgcctagcaacatgcccaggatcacgcggctgatgtcttcagtggtcgaagcaggaatcggtgtcaggggttgggattggctgtgagtgcccatccagatcaacccggcgaccaacgccagggtggcgcccagtttcaacgccgggtactgcgcgggcgcctcactggcccatggctgggccgccttgggaggcgctgctttcggcgctggcggttgacgctccagcaacgcgcggatcacgccttcctgctcgggactgaccggcgccaagccgccaaggatctcacgcacatcggtgatgtccggcacgggcagctgcggcgcaaccggcgcatgacaatcgaaggtatcgagtaaggtgtaggcactgatctccagccacaacccaggctcaaggaccttggcgtcgcgcagctgcaaggcgtgcacctggctggcgcgcaccagccacaagtcggcggtgggtaaagcacgcagctcgtcagcggtcagccgtgccgaacacaacccacgcccctggcggaccagcggccagccgtctaaggtctggcaatcgagtgcgacgggcacgctgaactgcaacacatctccgtcggcaaaacggtaggcggcggcgcccgcgcgccagtgtccgaggatcaggcgagcccgctcctgcgtggtgaagcggtcagcaggcaaccacacaccgtcgatggactggtggccggtcagcagcggtcggcggatcagcaggggttcgtgctcatgcatgggcaggctcttgtttcaggtcgcacatgacttgcaaacgcatggcgcgctcggtgacgttgaacaccagtagttcccgggcggtggtcagcaccgccaccagcccgctcatggggcagaagctggcacgggcaatcggtgcggaggtggtgaacagcgtctgttgcagaccttccgagtacaggccgacggtgtgctggttcgggcccagcagtaccaatgcatagcactcctgcgcggccacatggtgatgcaggccgatagcactccagcccggcgccaagtcgatctgcgcccttttcgcggggaagctgtcgtgggtcaccaggcgccaactctggcggccatcatggtgagtgagtaatgcgcacccgccaaaggtgtacttccagtgggaggtgctggcgaacagtacctggctgaccccggccgctgcaccgaccgcatagccggaactgcggacaccagaggccgttgcggggtacgccaccagttgcccggcctcgctgcgggcgtagaccaacgacaaggcatccagctgcgccaagcctatgacattgttggttaccgagaaaaacgcgcccctcggtccatgaccgggacgctgccagtgggcgagctgaccatttgtatcaagcacatacaggcgttccgcttgttggccgcgcagccacaccgcgggcagcaaggtcgcggtgcccggtggcaggtgcagctcttcgcgtgcaggtttgttggcggaaacaaggccggggatattccagaaggtcaggatgtggccatcaccgagcaccgcaccgaggctgcgataattaaacgcggcggcaaacacatgctggtgtttgccccacaggcgacggcgtacctccagggcttttttctggtttttgtgcggcagcttgatcaccaccatgccgtgttcgtcgagcaggcgcagggcgacatagttgccggagccggagatgaccggtggcaatgtcaaagccacccgcgccacccgcccggtggcggtgggcggcggggtatgcgcggcgttatcgaactggcccttgagcaggcgcaccgcctgttgctcgtcgggcatgggcagcgacacgcgtcgtgactgcaaggcaaaagacagactgcgtccgtccaggttgcgcgcaatctgcacgcggtgggtgcaggtcttggaatcggtaggcggcaagcgctggccgaccacccagcactctcccacccgatgttcggccaaggcgtcacgccaagccagccaatgggtgtcgctcaccacctcgtaggtgcgggcctcgagcaagcgcttgagttgcgccgccgagtccagctcatgcaacaccggcgtgccctgcagaatgccccagcgcaattgcgcccccgcctcctcggctcgccgcgccagcaatatcagcagcgccaggtgtaccaggcgcgcgacgcccaattgcaggggtccggcgtcgaacaacaccacgatcagacggttcgccgcctgggcgcggtactgtggcgcgaggaacatatgctcgccgccgaccgcccggcgcaggaactcatcgggtacttcatcggccagcagccattcgctggagagcagccgctcataggcaccgcgccggtgcaggtcgcccaggccgtcgggctccggcacaccgccctggtgcaggcctcgcagcggtcccaacagcgggttgaggcggcccagcaggtcggcgaacacgggtaactgttccggggcaaaccattccagccagtgccgccagggttgcagcgactcaggcagttgcatgagtgactccccaataatcagcgatacgttgcacaagggcaggcgaaacggccagcaagcggtccaacgggaccacggccgcaggctcatgccacaccagcaggggcgaacgcttgaagcgtgcggaaaaggcctggcccagcaggtcttggggcacatccggctcccagctggtcggcaaccagaggtgtggcgcgctcgcgctgggagccgcgtaagccacgccgtcgacccacggcagatcagccgtcgagccggtcaccaccagcacctcaccgttggccgtggcgtgcagacgcgcggcgtgttcaggctcaagcagcgccaggcgcctgagcatccggcgtgccgcatcaccccaggccacggcggcttgcgcctcgacgggtgcctggcgtgagcgccagcgccaaggatgggtcaacgcactcattcggcaggtatcagcaaacgtgtaagttgcccccgcgcctgctgcaacggctcgggcatcgtctggctgttgaagttcgcatcaatctcgcgcaacaacccttcgagcgccgtactggtcggcggttcgctacgggcgagatagtcttcggcggtttccagcaggcgattcagacgtgacatcggctgcaacgtagcctcttccacggcgctgaacagatggctgttgctggacgcggcaaacaggtcgcgcaacacctcacgcccctgttgttgggtggcctgggtcggcaacacgtacagcagcggccacaggtcagcgtcgctggcttcgaggcggccgctgagcaacgcggcggcggcgatcaggcgttgggatttgacgatgcgtcggtcagacaactggatgccggcttcacgcagacgacgaaccgcctgggccagggcgggacgcacggcggccaggtcgacgtttttcaacgcatggccaagcgtgtccagttgcgtgaggcccagcaactgctgcaccgggcgttgctccgactgccagccaccggccagcatggcctccaattggttgtccggcaccgactcgacaaacaggtgcaacaggaaacgatcaccaaaggccgccagcgcttcatcatccggcaggccgttggccgcgccgacgcacacccgcagcgggcattgcacctgggtgtggccacggcggaaacgccgctcgttgagtacgccgagcaaggtattgaggatcgcggtggagcccaggaagacttcgtcgagaaacacgatgtcggcttccggcagcatgccgctgacatcggtttccaccgtgccttcgcgcagctttttcaggtcgaccgcgccaaacagttcggacggttcggtgaagcgcccgagcaggtactcgaaatagcgcccgcccatcgactgcgcaacgcgccgcaccacggcgctcttggcggtgccgggcggcccgatcaccaggatatgttcctgggccaccgccgccagcacgatcagttcggccaattgctcgcgccccaccaagccctcggttgcggcacgtacagcatggcggatttgcgcggcagcgctttgcaactgagcaatcatgggcgtcttccctgaaaccaaagcgctgaatcttgcctgaggctaaggtattagcaaagcgttgttacataccctgatcaggagtcagcccatgcagctcgaaggatcctgccattgcggcgccgtcacattcagcctcaccagcgcccacccctacccttaccagcgttgctactgctcgatctgtcgcaagacccagggcggcggtggctacgcgatcaacctggccggtgacaccgcgagcctgaaggtgcgcgggcgcaaagccatttcgatctaccacgccaggctcaagcccgaaggcgccagccgcgcccatgcgagtagcgccgagcggcatttctgctcgcaatgcggcagcgcgctgtgggtgttcagcccggaatggccggagctgatccacccgtttgcctcggccatcgacacactgttgccggtaccgccggaccatacgcacttgatgctggcgtcgaaggcgccgtgggtggagctcacagtgcgcaagggtgacctgcagtttgacgagtacccgcaggagtccattgcgcagtggcatgagcggcatgggctggcgcgttaatcaccacagaatttttttgccataaaaaaaacaagcctcaggtggacaagcgaaattgacagattgtagattggatacagttgacaatctaaaagcagtcccaccacaacaaaaaaggtacttgaaatggcaatctggaaaggcgttttccccgcagtcaccaccaagctgaccgaggatggcgaggtcgatttggcggcaacccaagccagcattgatcgactgatcaataatggggtttcaggcgttgttgtcctgcctatgctgggcgagaacgcgtcaatgagcatgcaggagcgcgaatcagtcattcgcgcggcggtcgaggtcgccgacgggcgtgtgccggtgctgtgcggcctggccgaaatcaccctgcaaacggccaggaagcatgcggcgctgtacaagcgttttggcgcccaaggactgatggtgtttccaagccttggctacaagaccgatcatcgcgagacggtggaatggtacaagggcatcgccagcgcaaccgacttgccgatcatgatctacaacaacccgatcgcctatggcgtggactgcaccccggcgatcctggccgacctggtggacacacccgagatcgtctgcgtcaaggaagaaaccggcgacatccggcgcgtgaccgacatgtacgtggccttcggcgatcgcttcagcatcttttgcggggtcgacgacctgatcgtcgaaagcagcgcactgggcgtcaccggctgggtgtcgggcatgaccaacgtgtggccggcagaatgcgtcaagctcttcaatctctgcgcccagcaacgcttcagcgaagcccgcgagctgtaccacatcctcaccccgtcctttcacctggatgtacacgtcaagctggtgcagtacatcaagctggccgagcacctggtctacggcgcgccggaatggacgcgcgcaccacgcctggcccttgtaggcgaggagcgcgaatacgtgatcagcaccgtccagaaagcgatcgatagcctcgccgttcgcggctgacgcaacgggccctttcgcctcgtcaaggggcccgctccgtcaaccatcatccaaccccttcacagccatttttcattgagcgagtcccgttatgtccattacaggtgagatgctgatcggtcagtcgaaggttcgcggtaaaaacggtcagatgtggggattcaacgccgccaccggtgagcccctttccccagccttcggcggtgccacgctggacgacctcgacagcgcttgcgcactggcaaatgcggctttcgatgcttaccgcgaaacgacgccagggcatcgtgcggttttcctggaaaccattgcgcgcaatctcctcgcgctgggtgatgccttgatcgaacgttgcatggccgaaacaggtctgccgcgcgggcgccttgagggcgaacggacccgtacggtcaaccagttggcgctgttcgcctccgttgtccgcgacggcagtttcctggaggctcgcgttgatcctgcatgccctgaacgcataccactgccacgcgcagacatccggctgcgcaacattgcccttggcccggtggccgtgttcggcgcgtccaattttccactggcgttttctgtcgcggggggcgataccgcctctgcactggccgccggctgcccagtgatcgtcaaggcgcactcggcgcatccaggtacatccgagctggtgggccaggcgattcagcgttcaatacgtgcatgcaatttaccggagggcgttttctccctggtattcgatacgcagcacagcatcagccaggccctggttgccgatcaccggatcaaggcggtgggcttcacgggttcgcaacgagcaggcatagccttgatgaatattgcagcggcgcgcccggagccgataccggtctacgccgaaatgagcgcgatcaacccagtggtgttgctgccccatgcgctggccgaacgcagtgcggcgatcgctgacaccttcgtcgcttcgctcatcctgggcgcaggccagttctgtacgaaccctggattgatcctggcgatcgagggcccgtcactcgcagcctttgagcacgcggcaatcaccgccctgagcgccgcacctgcgacaaccatgctgacgcgtctgatctatgacaattattgcgatggtgtcgaaaaactgcgtgcgcagtctggcgtagaactgcttggacgaggacgacaaggtgaaagcttccaagggcaggccgcgctgttcgccaccagcgcgcatgcgttcctgaaaaatacagaactgcgtgacgaggtctttggcgcctcatcgttgatcgttcgatgccccgatgcctccagcctgctgcaggtacttgaagcgctgggaggtcaattgacgatttccgttcacgccagcaccaacgactaccccgcactcgccgcgctgctgcccacactggagaaaaaggccggacgtattctgctgaacggtttcggcacaggcgtggaagtctgtcatgccatggttcatggtggccccttcccggcgacttccgaccctcgctccacttcagtaggcagcctggcgatcaatcgattcctgcgccccgtgtgttaccaggacttcccccaggctttgctacccccggcactccaggacagcaacccattagggctcagccgaaggatagatggcacagtgaaaccttgacatgtttcgcgctcatttactggaagcgtcctacactcgtgagcctgaggtatgatcgaccgatggggatctcaaatcctggatccattcacctgtcagtagttgaagaatgccgaagaaagagcctttacccaacctgcgcatcaaacgtcaaagcttgcctgaaaccctggcggaatcactgcgtgagcggatcctgaatggggaattcaaggaaggcgagtcgctgatccaagagaccattgcgaccgagtacggtgtgagccgcatgccggtgcgtgaagcattcaaggagctggaggcgtccgggctgatcacgacgcagattcacaaaggctccgtggtgaagtccattccccttgagcaaatcgcggagttgtttgacctgcgtgcgctattggaatccgagctattggaacgctccctgccgaaaatgaccgacgcacactttgcggccaccaaacaattgctgccgcaacttgaagccgcctacctcgacgatgacatcgcgcaatggggcaagctcaactggctgtttcatcaaagcctgtatgcagcggctgatcgtgtgcaaacgctggctatcgttcaaggcatcaacgttcagacggatcgatacatccgcctgcaactgttgctgaccgcggggaaaaaagaagccgaagtcgaccaccgcgagctactccacctgtgcgaaaaacgtgatgtcaagaaagcggttcagttcctgcgcaagcacattcagcgtgcaggttctgacctggtcacactgctcaagaaaaaacgcgataaagaaacccaggcttgaatgccagtggcgcccctccttggcggaggggcttgtccacttggctcaattgagttgaaacccatgcgccagcggatcgcgctcatccacaagaatagtgttgtgccccgtgacctgagcccaaccagcaatgctcggcatgatgcccgggaaagcacctacctccgtcgccgactcgacccgacaatcaaacagtgtgccgatgatgctctcgtggacaaacgtatcgcccaccttcaagcggcttcgggcgaccagttgtgccatgcgcgcagaagaacctgtgccacacggtgaacgatcaatggccttgtcaccgtaaaacactgcgttgcgcgcgtgcgcgcgtgggttcctgggtttgtcacaccacatcacatggctgatgccctggatacgactgtcttgcggatgcaccggcgccagcagcgcctgcgcggccttacgaaccagaggactcaaccgaataatttcactgacgtccattgaatccaggccatcccaaccggcttgcggctcgatgatgacgtagaaatttcctccatacgccaggtctatgttcaatttgcccagggtgggtacatcaagcgccacattagctgcgtggagataactcgcaacgttgtacaggcgaacctgctccactctcgtaccgtttttcacgtagtcgatcgcaacgcgcccggccggcgcctcgatggccaacgaaccctcgatcctcggcaccaccagaccggcttccagcgccgcagtcaccgttccgatggtgccgtgaccgcacattggcaggcagccactgacctcaatgaacaacacgccgatgtcgcaatcctcacgtgacgacggatacaagatgctgcctgacatcccatcatgaccacgcggttcgaacatcaacgcttgtcgcacccaatcatgctcgcgctggaaaatctgacgcttttcagccattgaaacattgggcagcaaaggcccccccgcggtgacgatgcgcaccggattgccacaggtatgcgcatcgatgcaaaagaacgtatgacgagacataggaactcccttttgaacgcgttagttgaaacggctgattgcatagggttcaaggtcgaccaaagagggtttgcccagagcaatatcgctgaccaagcgaccggttgtggccgcctgggtaagcccgagatgaccatggccaaaggcgtatatcaccgagggatggcgcgctgaggcgccgatcaccggcaggctgtcaggggtcgcagggcgatgcccggcccaacgggtaccgccctccgtacgcaacccgggcagatagagcgcggccagcctggccaaggcctgggagcgcttgaaattcgccggtgcattcaacccgccgaactccgcggcgccaccgaccctcaaaccacagctcaacggcgtggccacgaagtggcgctccgcgaagatcacctccctggacaagacgacacccggttcgggaagggtggtgttgtagcctcgctcgctttccagcaagaccttgtcgccaaggcgctgggcgagtaggcctgaccacgcaccggcggcgaccacgaccttatcggccgttaaccaccggccatcgacgagccccaccgacacagcgctaccctcaaggcccggccggataccacaggcctcggcgacctgaatgcaaagccccctggcaagcaatgactgacgcaacttatcaaccagggtcttggggtccctgacgtgtgaccactggggtgtgaacaccccgcgcgtgattgtccgacccagtgcaggctcgatttcacgtgcttcgttgccggtcaacgtgcgcacctcaacaccccacgctcgtttgaggccccactgcattgcgtccttgtcaaacgccgcttctttctcgtagaccgtcagggcgccgagttgtagcagctcttcgcgaagattgtgttccgcgagcagcggcagcaggtcgtcgtagacccgagcgttaagtgccgccaacgccgccgatatgcgcttgaactccgagggcctgccggcacgggagaaacgcagcagccacggtatcaacctgggcgcgtgccccggacgtatcgccaggggtcccaacgggtccgccagccatccgggcactttccacaacacgcccggcaccgcagctggaatcacttccgtgaccgcgatgcctccggcattgccgaacgatgctttgtcaccttcagggtcgcggtcaaccagggtgacgcggactcccgcccccagcagatgatgcgccgttgccagccccacaatgccggcgccaatgacgattacgtgcctcatgaatcgcacccttttcagatggaaaaaatgcacctttttgaaagcaatcatgcccgatctgatcgaccagaacgagcgcatgtagattggatacaataaacacaatctgtcaaccgtcgctgctgcgtctgccaaaccctgacacacttcatagtcagcaacatcttttttattagacacaaccaattgttttttaaggtttatttagaatttataggctgtttttttgaccttcaatgcaaaaaaccctgtttccccctctacttccgcgaataaacatttggtagatttttcgacagatgtagattggatacaacgcataccaacgccacacccctaaaaaatacaatgccaatcagatcggggatttccatgaacattgcacgtcacgcaagcacctctctcctgctcgtcctcgccacaaccgcttccatgaactcagccggcgccggttccaccctggaccaggtcatttcatcaaaaaccctacgatgcggtgtgcaactcgactacccgccggcgggttttcgcaaccaggccaatgagccggagggatacgacgttcagtactgcaaggacatggccaaggcccttggggcaaaggccgtgattgtcgagacaccttcctccgaacgtattcccgcactggtgtccaatcgcatcgacgtgctgattgcttccacctcgatctcaccccagcgcgccatgagcgtgaatttttcccagccctacgtgaactacaccaacgttgtactcacccgcaaagacgccaacatcgaacgtttcgaggacctgaaaggccgcaacatcggtggtgtcacaggcaccacgaccgagcaggaactgcaggcgctacgcaaaggctgggatgacccgaacggcagctatacggggttcggcagcgaagccgaaggttacctggcactggcccagggcaagatagacggcgtgatcatcgggaatgcatcggcggccgcactggttcagagcggtcaatttcccacgctcacgatcaagggagtagcacctacgcctcccgacctgtgcggcatcgccgtcaaaaagtcagacccgcagatgctcaattgggtgaagaccttcgtatggacccaagtcaagaacggtcgctaccaagaactgtatgcgcagtacttcggtgacggcgaggcgcctttgctgacagttgccggcgtggactactaacctcaccttccgagcggccggccgcggccgctcctgcctggagcctgcgctatgttcgggtacacgttttattggtcaatggtctgggagaagctccccgagctgatcgagggggcaaaaacgacgctggtgctgaccgtactttcaatgatcatcggcacgctgatcgcccttgcgctgaccctgttacgtcaacaggaaaaaggccttggatacgctgtcgcaacgtcctggatcgaagtcgctcgcaatacaccagcgctgttccaggtgtacatgatctattttggccttggcgcactggggctgcatttctccagctacctggcgatgctgttcgccctgtctttcaacaacgccggctacctcgccgagatttttcgtggcgggttgcaggctattccacgacaacaacaccgcgcagccaggtcgttgggtatttcatcattcgctgcctacacccatgtggtctttccgcagctgttcaggattgtctatttcccttacgtcaaccaactcaactgggccctgctcaacagctcgctgggcatgatcatcggcctgcgcgaactcacgggcgccacgcaggcggcccagtccgaatccttcaggacgtttgagtttttcatcatcgccgccgtgatctacttcgtcatgtccaagcttatcgagggcggcgcccgactcactttctggcgcgtgttcaaggggtaggcaatcatgcaattccaattggcttactcaggtttgcactggggcgatcttccgtttgtgctcaccggtatgtggcacaccttgttactgacgctgctggccaccttttttggcagcctgctcggcgtgatgatcggttggcttcgacaagaatcagtgttcgcacgtctcgcactcggaccgttcgtcaacgtcatccgcagcattccgctgatcatccagttcatcctggtcaacagcctgtttgccatggccggcttcgggatgagcccactgtttatcggggttgtcgtcctcagcctgtacatgggcatgctgacctcggaactggtccgcgcgggtttgcaatccgtgcgcccgcaactgaaaaaagccagccggtcactcgggctgagctattggcaggagctgcgccacctatccgccccgcttgcctttcgcacactgcttcccggctggattggcacagtgataggcctgacaaaagatacagccctcgtgagcgtagtgggctacatcgagctgctgagagcttcacagatcctgatcaaccgctcgaacgaagcactcctggtgctcgcgggcgcaggtctcttctactttgcgatctgctacccgatctcccgctacagccgccatctcgaaaaggtaatgcaccatgattgatatcaaggatgtccgcaaaagcttcggcgctgtcgaagtcatcaagggcgtcaacctgaccatccagaagagtgaagtgttgtgcctgatcggcgccagcgggtcggggaagtccaccttgctccagtgcatcaatggcctggagccgattcaaggaggtagcatcatggtcgacggcacggatgtgcacgccaggggaaccgacctgaacaagttgcgccagaagctcggcatcgtgttccagcaatacaacgcattcccccacctcaccgccctggagaacgtggcgctggcgccgcgcctggtcaagaagcttcccaacgcccaggctctgcaactggctcgtgaccacctggctttcgtcggcctcgacaatcgcgcagacatgcgccctgccagcctgtctggaggccagcagcaacgactggcgatagcgcgcgccctggccatgcagcctgactacatgctattcgacgaggtcacctccgccctcgaccctgaactcgtgggagaggtgctggatactatccgcaaactcaaggactcaggcatgaccctcatcatggtgacccatgacattgccttcgctcgcgagtgcgcagaccgaattgcattcttcgataacgggttgatctgtgaagtcggtgacgctcgccaggtaatcaatgagccacaggaagaaaggacacggcagttcctccaacgcgtattgcactgacgtgacatgagccacacaccttggcgcgttaacagtctttgacagtttctcgacaaagctgtcaaagacccccgggcgccacgcccctagcatttgagcatccaaaccacctgccgggtgctcatcatgcttcgcacgttgcgcggtattccattgctcggttgcctgttgggcagcatcggctgccaggggcaagcctctaccccgccgccgatccccaagggcgactacagcgcgatcatccgctacctgcaaacccgcatcccccgggatatggcccaggccaatgtgcccggtttgtcgattgcactggtcaacgggcaggagttgatctgggcgcgcgggttcggcatggccgacaaaaccctgggcgtgcccgtgacgccgaacacggcgtttcgcgctggtgcgatttccaagctgctcaccgccagcgccgccctgcaactggttgaacagcagcggctggcgctggacgcaccgatccaacagacgttgcgcgagttctatgtgcgttcgcgtttccacaccgaccagcaggccgccgaccgcgacatcaccttgcgtcgcctgctcagtcatcaatccggcctgcccagcgagcacctgcgcgacctgcgcaacagctatgccatggggcagatgccgatgcgcctgtccggcgtctggctgagcacaccgcccggcacccaagtggcctattccaacctgggttatgcgctggtcggcgcggcgatcgaacgcagcagcggcagagagttcgaggctcaattgcaacacagcctgctcaagccgctggagatgaaccaggcgagttttatcggcaccgcagtacaggcgggttatcgcgcccagggctatcagggtggtatcgccagcactgacgcgcaagtgcgtgacctggcggccggcggtttgtgggccagccccaaggacctcagccattacgtacagatgttgttcgccgagggcctgtacaagggcaaccgggtgatgaaccagcggtccatcgatgacatgttcacccagcaaaacaccggcaacgccctggacttcgattgccggatcggcctggcctggtttctcgcgccgtgcggtgacgagccggtcgggcctggcgtgcgcacctaccagcacagcggtggcggcgatgattttgccgcgcagttgaccctgctgccggaccagcaactggcggtgatcatcatggccaatgacagcaacgccgaagacctggtcgccaacctggccaccgacaccctgcgcctgatgctccaggcgcagaccggcgagccggtgtgcagcgacgagtgccaggcgccccgtcacgggctcaagctgcgccaggtgccggccgccatcgaccgccagcgcctgtccggcttttacgccaccgcctggggcgtgttccgcatccgggacgacgccggtcggctacgcggcgaactggccggctacgacttcgagctgctgcgtgacgaccacggctggctgcgcgcgcaaaagaaagtcctcgggttctggctcaaggacctcggcgaactcggccgcgtacagctcgacgtgatcactgtgcagggccgacagatgctcaccgcgcgcagccacggccagcgcatcgccatcggcgaacgcatcgacccgccgcccttgcccatggcgtgggccgacaccgtcggcacctatcaagtgctcaacacccatgaacccgacgcgccgttgagcggcatcagcgtgcgcctggaagacggcttcctggtgattcgcggccaactgcacgacgagcctttgaccgattacatcctgctgccggtggacaacgcccacgccgtactcgccggcaacggttatggcctgggcgacaccgtcagccgccaggtcaacggccttagcgcctcgggatactccttcaaacgtacccatccacccttgagtttctgaccgacatgaaaaccctgatgagccccaaaaacctctgcctgtccctcacctcgctgtgtttgctggcaagcgccgacgcagtgctggccgaggactggacctacacgctcaaagccggcgtggccaacctgccccgctacagcggcagcgatgagcgcatgactgcgccggtgttcggcggcgccatcgtcagcccctgggggattttcctcgacaccgacaaaggcctgggctggggctacgaaggcaatgccttgagtttcagtgcgtatgtcggcgccagtgcatcgcgcaaggacaaaaacgaatccatgcacttgggctccaagcgccttaagggcatgggcgaaatcaagtcacgcccgcagctgggcgtgagcgcccactacaatctcggcggcgccattgtcggcgcgaccctggagcacgcgctcaaggaagatgaccacaaggacagcggcaaggcctttacgcatttggagctgagcctgggcaccacgctgtacgaaggccgttatggctccgtcgatgccaacatcaacagccactttggcgaccgtgactatatgcagacctggtacggcgtcaccaccggccaggccgcacgcagccgcttcaaggcctacaaggccggtgccggcaatatcagcaatggcctgaacctggtctggagcctgccgatcagcgagcacaccgagttctcgaccttgctggatgtgcagtacctggcggatgaagcgggcaagagcccgattgtggagcgacgcttgcagacgtcggtgatgggcgtgctggaatacacgttctgattggataggtgggagggggcaagccccctcccacacttgatctccattgaatgtaaaagcgctattcggcgtaggcccaggtcatccggaacgacgcgccgccccattccgaatcctgcacctgcacctggccaccgtgccactgcgacacccgctgcaccagcgccaggcccaggccgaagccaccggtgcggcggtcacggctggcatccaggcgcatgaagggttggaagatcttcgaacggccttcctccggcacgccagggccgtcatcacacacccgcacttcatacccgctgccgaacttgaccaacgacacttccacacggcgctcggcataccgaatggcattgcgcagcaggttgatcaccgcacgcgccataaagcgcggctcgatctggatatagtccacttcgcaggtgcgcaacgacaactggatgcccgcggcttcggcctccagcgccacgctgccgatcacactgtcgagccagctgtgggcctcgatgcgctcgcgggtgacctgggtggcgccgcgctccaggctggcgtaggtgagcagttcggagaccatttcttccagctcgcccaggtcggcatacatgtcggcgatcagttcgccacgcagacgcgggtcggcttgttgcttgagctggtcgagctcgaacgacaggcgtgcaatcggcgtgcgcagctcgtgcgacaccgcattggtcagttcgcgctggttggcgatcaggctttcgatgcgctcggccatctggttgaagtgccccgccagttcgcgcacggtggaacggcgcggcagcaggatgcgagaactgaggtcgttgtcaccaaagcgttgtgcggccaggcgaatatgctcgaggtcgcgccagtgcgggcgtacccagaaatacagcacgatcgccaggcacaccccgaggaaaccataggcccacaggtagagccacttgggttcttccggcagcttgatttccagcagttgcgggccgccgtcaatactggtgagaaactccatgaaatcaccgcgcaccaccagcaaacccgcagccagcagttgcgtctcgcgctcggtgagtgcctgggtgtccttctggaccaacttcaagtgcagcccgtaatggggttgcagctcagccagccgggccgggcgttcgtcggccctgagcggacgcagttgctccaccagggcatacgccgggccgcgcaaggcttcgcggttataggtttcgttggcttcgggcaacagctcgtcgaaggtgtagttgaccagccagatcgcccccgccagaccgagcgccaggatcacatacaggcgcagaaacagccgcagcatttaagcctcccacgcgaacggattgaacaggtagcccttgccccagatggtcttgatacacaccggttcacgggggttgtcgttgagcttgctgcgcagtttgctgatgtacacgtcgacgctgcggttgaggccgtcgaacgcgataccgcgcatgcggttgaggatgtcatcgcgggacaggatcgtgcccgagttgctggccagcagccacagcagctcgaactccatggtggtcagatcgatcttgtcgtcgcccaggctgacgccccggcaactgcgatcaatggccaaccgcccgaatgccagggcaccgcgcacggtcggctccggggcctggcgtcgttgcagcgcacgcaggcgcgccagcagcacaggcggcttgatcggcttgatcacatagtcgtcggcgccggactccaggcccaggatgtggtcaaggtcatcttccttggccgtgaggatcacaatcggcgtgtcggacacggcgcggatcccgcggcacacatgcaggccactctggccaggcagcatcaggtcgagcacgacgatcttcggcttgaactccaggaacgcagccagggcctcgtcgccccggtgctccacacgcacctcgaagccatgctgcgccaggaagtgcgcaatcagccccgcgagtttttcgtcgtcttcaacgagcaagaccttgcccagccccaggttttccataagttctcagtgtgcagacgcggattgaagagctggcattataggtggcaagctgcgcaactaaagcaactgcgcagcggctgccgacgaagcttcatgcttttaagagtttttaacaaataccccgcactctttaacgccgtccacagggagttgtatgcgcaaggattacctggcgttctttgtttcgctgttcctgtcgcggctggcggaccagatcctgctgttcatcgtgcccctgatcgtattccagaccacccagagtgtagcctgggccgggctggcattcttcgtcgagtcgctgccgcgttacctggcgttcccggtgtgcggcgccttgtgcgacaagttcacgccggtgcgcctgctgcagatcagccaggtataccgggcgctggcgtgcgtgctcgcggtggtgttgtatggggtgttcgatggcctttactggattgtcctgctctcggcgctgtgcggggtgctcacgacccagggcatcatggcgcgggaagtgctgatgccgcatatcttcgcgcactacagctacgccaagaccctctcctactcgcagatcgccgaccagagcgggctggtgctggggccgctggtggcggcgctgatgctggaagtctgggcctggcattgggtggtactggccgtggccggattgtttgtgctggccgacctggcgatgcgcgtgtggcaacgctccagcacggcgcacctggaaaccttcgaacagcatcaggacatctggctgcgaccgctaaagattgcgttcgggcatatccgcaacctgccggacttgaaacggatcatcaccctggccgtgggggtgaacctgatcattggcgtcaccctggccacgtcggcggcgatggtcaccggccagtttgcggcgggcaaggacgcctatgccttgctgcaggcagcgggcgcattagtgaccatcggaattttgttttacctggcccgggccggactgccgttgaaggtactgggcggcttgtcctattcgatgatcggcgtgggggcgttgatcatggccgcaagcccaggcgtgtggctgtacgccgtgggtttcctgctggtgaccggcttcgacaagatgttcaacgtctacctgcgcagcacccgccagcgggtgatccccgtgcaggacttcggcaagaccgtgggcgtgatcaccctactcaacaacctgccgcaacccttggccggcctggcagtggcggtgctggcggcgccgctggggacgcagacggtgatcctgctgctgaccgggatcgccgcgttgctcggtgtggccgtggcctcaggctggcacgccactgtgaaagcggaactcgatgtcgggtgactcgatcagttcctgctcggtcgccctcacccgctcgatcacctgggcgacgtccttggcgtcgccgtattggtacgccagcttcaggtaaccctggaagtgccgcgcctcgcttttcagcaggccgaagtaaaacttgccgagttcctcgtccaaatgcggcaccagggcttcgaaacgctcgcaactgcgcgcttcgataaaggcgccaaccaccaaggtatccaccagtttcacgggttcatggctgcgcaccactttgcgcaaaccggaggcgtaacgcccggcatgcagttggcgcagctcgatcttgcgcttcttcatcaggcgcatgacctgctcgtggtgcaccagctcctcgcgggccaggcgcgacatcatgttgatcaggtcgacatggccgtagtacttggcaatcaggctcagggcggtgctggcggctttgaattcgcagttcttgtggtcgatcagcagggtttcctgatcggccagcgcggcctggacccaggcatcaggggtgcggcaaccgaggaattcgtggatttctggcaggttcatcgggctcacgggcaaaaggatcacaaaaggccggcgattataccgaccccgccgcagaccaccagccaccggccttgatgtgcatcaacatgacgtgcgcacgccagcaactatagttgttccaggcccccgtcctttttatggagatcccgatcatgcaagccatccgcagcatcctggtgatcatcgaacccgagcattcggaaagcctggccctcaagcgtgccaagctgattgccggggtcaccgatgcgcacctgcacttgctggtgtgcgacaagaagcatgagcactcggcgctgctggccctgctcaaggcgggtttgaaggaggacggctacagcgtcagcaccgaacaggcgtggaatgccagcctgcatgaaaccatcatcgacgtgcagcaggccgagggctgcggattggtgatcaagcagcacttcccggacaacccgctgaaaaaagccctgctgacgccggcggactggaagctgctgcgctattgcccgagtgcggtattgctggtcaagacgtccacaccctggacgggcgcaaagatcctggcggcgatcgacgtcggcaataccgatggcgaacaccgttcgctgcacaattcgatcattgaccatggctttgatatcgccaacctggccaaggcgcagttgcatgtgatcagcgcgcatccttcgccgatgctgtcggcggcggacccgacgttccagctcaaggaaaccatcgaggcgcggtatcgcgagcaatgcagggcgttccaggcggagttcgatgtggatgacaaacacctgcatattgaagaaggccctgccgatgtactgatcccctaccttgcccacaaactgtcggcggcggtcacgatcatcggcaccgtagggcgcaccgggatttccggggcgctgatcggtaacaccgcagaggtggtgctggacgccctggaaagtgacgtactggtgctgaaacctgacgaagtgatggatcgcctcgtggagcaggccaacaaggcctgatgccgacctttcaaacaatgaagataaaaaatgtgggagggggcttgcccccgatgagggtgtgtcagtggataaatcccaggctgacacactgccatcgggggcaagccccctcccacaggggttatccgttgtcagttggaaaacacatcgcgcagaaaccccggcgcgatatagcgctggtaatgcgcctcggacaggataaagaactcccgatcaatcgcatcgcgcaggtccggcaacggccagtcgcgaaactccggcaatagcaccatgccataggcctccaggttggagatcacccgcgccccccgggcgatcaactggtaggcccagcagtactcggactggtgcggcacgaagcggatcttgcgctgttccaactggccgcgcagggtcttggggtcgaaaacctccagtttgccggccattacctgcaccaacagctgctccaggcgtagccagaccgcacgtttttcttcttcgttatagcaattccactggatcacttcgtggtggaagcgcttgcagccccggcacaccagatcgccgtaaaccgtggagcacaggccgacgcagggggtcttgatggtttggttggacatgggtaacggcacgcagatcagcaaaacaatgcgccatgttagccctttgtctaagctcgatcacccagcaaacttggtcaggcaacttacctttagaaattttttgccgtagaatcatccggccttgtaaggcgccaataatccgctggaagctgttttcaaagcgtcacgagcacagtcgttccttcagaacggtgttggcgcgggtcatgactcggtaggtcagagccctcgccaaccctcatcagctccgttctgcaggcgtaaaactttgaaagcagcttctgtgaggaatgccggcagcgctggctttgcggcccaaaaagcccccgagcgcatgcgtgccgttcatttctggatgagcgtcccgtgggaccactgatgagggtaataactgtgcttgaagcctaccgcaaacatatcgaagagcgtgcagccctgggtattgttccccagccgcttaacgccgaacaaaccgcaggcctggtcgagctgctgaaaaatcccccggctggcgaagaagaattcctcgttgacctgatcaccaaccgcatcccaccaggcgttgacgaagctgcctacgtcaaggccggtttcctgtctgccctggccaagggcgaagccacttcccccctgatcgacaagaaacgcgccgttgaactgcttggcaccatgcaaggcggctacaacatcgtgaccctggtcgagctgctggacgacgccacactggctcccgtcgccgccgcccaactcaagcacaccctgctgatgttcgatgcgttccacgacgtggccgaaaaagcccgtaacggcaacgaacacgccaaagccgtgatccagtcctgggctgacggcgagtggttccgcaaccgccctaccctggccgacaagatcagcctgcgcgtgttcaaggtgaccggcgaaaccaacaccgacgacctgtcccctgcgccggatgcctggtcccgtccagacatcccgctgcacgccctggccatgctgaaaatggcccgtgaaggcatcgtgcctgacgagcaaggcaagaccggcccgatgaagcagatcgaagaaatgcgcggccaaggcttcccgatcgcctacgtcggtgacgtggtcggtaccggttcctcgcgtaaatccgcgaccaactccgtgctgtggttcttcggcgacgacgttccgtatgtgccgaacaagcgtgccggcggcttctgcttcggcagcaagatcgccccgatcttctacaacaccatggaagatgctggcgcactgccaatcgagttcgacgttaccaacatgaacatgggcgacgtgatcgacctgtacccgcatgctggcaaagtctgcaaacacggcaccgacgaagtcatcaccaccttcgaaatgaagaccccggtgctgttggacgaagtccgcgccggcggccgtatcccgctgatcatcggtcgcggcctgaccgacaaggcccgtgccgagctgggcctgggcccaaccgacctgttcaagctgcctgaagcgcctgtcgacaccggcaaaggcttcaccctggcgcagaaaatggtcggcaaggcgtgcggcctgccagaaggcaaaggcgttcgtcctggcacctactgcgagccgaagatgaccaccgtgggttcccaggacaccaccggtccgatgacccgtgacgaactgaaagacctggcgtgcctgggcttctcgaccgacctggtgatgcagtcgttctgccacaccgcggcctatccaaagccgatcgacgtgaccacccaccacaccctgcctgatttcatcatgacccgtggcggtgtatcgctgcgtccaggcgacggcatcatccacagctggctgaaccgcatgctgctgccggataccgtcggcaccggtggcgactcccacacccgtttcccgatgggcatctcgttcccagccggttccggcctggtcgcgttcgccgcagccactggcgtaatgccgctggacatgccggaatcgatcctggtgcgtttcaaaggcaagatgaaacctggtatcaccctgcgtgacctggttcatgccattccttactacgcgatccagtcgggtctgctgactgtagagaagaaaggcaagaagaacgccttctccggccgcatcctggaaatcgaaggcctgaacgacctgacgctggaacaggctttcgagctgtccgacgcctcggctgaacgttcggctgctggttgcaccatcaagctgtcgaaagagtcgatcaccgaatacctgaactccaacatcaccctgctgcgctggatgatcggtgaaggctacggcgatccacgcaccctggaacgtcgcgcccaagcgatggaagcctgggtcaagaaccctgagctgatggaagccgatgccgacgcggaatacgctgaaatcatcgagatcgacctggccgaaatcaacgagccgatcctctgcgcaccgaacgacccggacgatgcccgtctgctgtcgagcgttgccggcgagaagatcgacgaagtgttcatcggttcgtgcatgaccaacatcggtcacttccgtgccgccggcaagctgctggagcaggtcaagggtcagctgccaacccgtctgtggctgtcgccgccgaccaagatggacgctcaccaactgaccgaagaaggctactacggcatctacggcaaggctggcgcgcgcatggaaatgccgggctgctcgctgtgcatgggtaaccaggcacgtgtagagccgaactcgactgttgtgtcgacttcgacccgtaacttcccgaaccgtctgggtgacggcgccaacgtctacctggcttcggccgagctggcagcggtagcttctaccctgggtcgcctgccgaccgtcgaagagtacatgggctacgccgcgaaactggacaccatggccagtgacgtctaccgctacctgaacttcgaccagattgctgagttccgcaagatcgcagcaagcgccaacatcccggtgattcaagcctaaggtgttgatgtgaagagacgccgcgtatcgtgaggtacgcggcgttttttatgcctggaatgcagtacaaatgtgggagggggcttgcccccgatagcagtgggtcagccaataaatccggcactgagacaccgcgatcgggggcaagccccctcccacatttttaccccgtcaggtttaagcgaagaacgaataaaccaccgcagtaatcgccaccaaccccaccgcggtgacgaacacattggacgcctgcccccggtacttggccatggccggcaccttgcgaatggcatacatcggcatcaggaacagaatcgaagcaatgatcggaccgcccagcgcctcgatcatgccgagaatgctcgggttcaacgtcgccacgatccagcacaccaccagcatgaacgccgccgtcatgcggtccaggcgcttggcctccggacgacgccccgtcttcagcaccaggcccttgaggccttcgctggcgccgatgtaatggcccaggaacgacttggcaatcgccacgaacgcaatcaacggcgctgcgaactcgatggtcgggttattgaagtggttggccaggtacgacaggatcgacaggttctgcgccttcgcttcggccagttgcgccggcgacagggtcagcacgcaactgaacacgaagaacagcaccatcaccaccatcaacagatgcgcacgcgacaggatctgcgagctgcgctcatcggcgtgggcgccgtactggcgcttctggtccactgcaaaggccgagatgatcggcgaatggttgaacgagaacaccatcaccggaatcgccagccacagggtgttgagcagtgcggacggtgccgggacttggctggcggtgctgaggatgccgccgttccaatgcgggatcaggtacaccgccaggaacagcaacgcgacgataaacggatacaccatcaggctcatggccttgacgatcacttgctcgccgcaacgcaccacgcccagcaggccgaggatcagcacgaacgacaggatcgcccgtggcggtggcgcgatgtgcagttggtgttccatgaagctgccgaccgtgttggtcaacgccacactgtagatcagcagaatcgggaagatcgcaaagaagtacagcaaggtaatcagcgcgccggccttgatgccgaagtgttcttccactacgtcggtgatgtcggagcctgcacggccagacagtacgaaacgggtcaggccacggtgggcgaagaaggtcatcgggaacgccagcagcgcgaggatcaccaggggccagaagccgcccaggcccgcgttgatcggcaagaacagcgtaccggcgccaatggcggtgccgaacaggccaagcatccaggtggtgtcctggcggctccagcttgtgagggttgcaggtgtcgttgcatagcgttcgtcgacgctattggcctgatcattcatccggtcggatctccgcatttacacagccgggacgagtcagaaaaacctgacaggcagcgccccgaccatagaaggggccggattgtccgggattcttgtgaataagcaaagacttagctgaggaacggtggtgcggtacaggcccgcaggggcggctgtaggcggcgattttcgcggcgcttggcgagatacctgatatacattcccgcacaaatctattttagaatttcacacgttactgtagttttcacacaacgcccaccgtgtatccagagagccccgccatgcctcgcgtctcccgcaaacaagccgatctcaaccgcgaaatcatcgtcgaggccgccacgcacctgtttcgcgaacgcgggctgcatggcatcagtctgtcagacgtgatggccgctgccggcctgacccacggcgggttctacgggcacttcgcctccaaggaggccctggccaccgaagcctgccaacaggcattcgagcacgccaacctgggctggcaggccaaaatcgagcacagcgacgatcaacaggccgcccgccaggcggtgctggggccttacctgaccgccacccatcgcgacaaccctggcgacggttgcccggtctcggccttcgccccggatatgtgccacgaacccgctgataccgccttgcagcacacctttatagaaggcgtggaaaagtccctggagattttctctcaactggacgacggagaccgtcaagccatgctggcccattacgcgatgatggtgggcgcagtcaccttggcgcgtgcgacacggggcaatagcctgtcggacgagttcctgaaggctgcaagaaataccctgttgcccgttgacagcccttcccccatcccagcatgatcgggccatgaacattatccagctcgtcctcacccgtaccaccatcacgaccgcttacggcgggtcgcgcggtggctgtgggtgcttgagctagacacttcacagatccaacccaaggccccgccagcaatggacggggcctttttttgctccgtccgttcggcaaccaccaggagcaacaccatggctgacgccctgctgatcatcgatatgcaaaccggtttatacgatggcccggacaaaccgtttgaacgcgaacgcgtgctcgcctccatcaaccagctgattcatcgtgcgcgcaacgcaagcgtaccgatcttcgtggcgcgccacaccggccctgggggctcaccgattgcagccggcagcccgttctggcagctgtggcatgagctagaggtcgacgaatcccgcgattacctgttcaacaagacccgtcccagttgcttcctgggcaccgatcttgagcagcaactgagcgcggcgcaggtcaaggagttggtgatcgtcgggatgaaaacccagttctgcatcgacactacctgccgggtcgccgtggagttggggttttcggtggtgctgcccgaagatggtcatacctgcatggacacgccggcgctaaaagccgaggcgatcatcgagcatcacaatacgaccctggccggtgcgtttgtaaagcgggccagcgtggccgagatccgcttctgaccgcacaaatacggcatactcctcccctcaaacccttcaggaagagccttccgatgaccgctactgttctggtcctggttgaaaccatcaacgaatacctgcccatcatcgagggcaatgactttcatgtgatcctggcgccgacccctgccgaacgcgccgaagcgatcaaggcccacggcagccagatcaaggcggtgctgacccgtggcccgctgggcttgtacgccgaggaaatcgccgccctgcccctgctggaaatcatctgcgtgatcggcgccggctacgaacacgtcgacctgcaggccgccagcaatcgcgggatcgtggttaccaacggcgccggggtgaatgcgccgtcggtggccgatcacgccatggcgttgctgctgtcgctggtgcgcggcatcccgcagaccgacgccgcggtgcgccgcagcgaatggcccaaagtgatgcgcccgtccctgggcggcaagcaactgggcattctcgggttgggcgccgtgggcatggagatcgccaagcgcgctgccctggggttcggcatggaagtgagctatcacaaccgccaaccgcgtgacgatgtggactacacctactgcgccaccgccgttgaactggcgcgcacctcggacttcctgatcctggccacgccgggcggcgccagcactcgccacctgatcgaccgccacgccctggatgccctggggccgaatggctacctggtcaatatcggccgtggcagtgtggtggtcaccgccgacctggtcgccgccctggagcagcgtcgcatcggtggcgccgcgctggacgtattcgacgacgaacccaaggtgcccgacgcgctcaagaagctcagcaataccgtgctcacctcccacgtggccggactgtcgccggaagccgcccacgacaccgtgcaacgcgtggccgacaacctggtggagtactttgccggccgcccggtgctcaccccggtcgccctgccccccgcccactaaatgaccgatcaggcacgctgatcatcgtccaacacgctaacctattaagccgccccgaccttgtcgctgggcggctgcgcgcattagattaggaaatagtccaaggcctttagaataagcagaagggataagcatggcgctgaacgaccaatcgacccagattcgcccaggcgaagagcttgatgccagcctgatcgatccctacctcaaggcccatatcccgggcctggacggcacgcccaggatcagccagtttcccggtggtgcgtccaacctgacctacctgctggaataccccggccaggaattcgtgctgcgtcgcccgccctttggtcacaaggccaagtccgcccatgacatgggccgcgaataccgcattctcaaccagctcaaggacggcttcccgtactgccccaaagcctatgtgcattgcacggatgagtcggtgatcggtgccgagttctatgtgatggagcgcgtcaacggcatcatcctgcgctccgacctgccagccgaactgggcctggacgccagcaggaccgaggcgttgtgcaaaagcttcatcgataagttcgtcgaactgcaccaggtggactaccacgcctgcggcctggccgacctgggtaagcccgagggctacgtggcacgccagatccgcggctggagcgaccgctacgagaaagccctgacccccgacgcaccgcgctgggaagcggtacgcgcctggctcaacgacaagatgccggccgatcaccccacgtccagcatcgtgcacaacgactaccgcttcgataacgtgatcctcgatccgcacaacccgatgcagatcatcggcgtgctggactgggaactcaccaccctcggcgacccgctgatggatctgggcaacaccctcgcctactggatcgaagcggcggacccggcaccggtgcaactgatgcggcgccagccgagcaacgcccccggcatgctcacccgccgcgagttcgtcgactattacgccgagcgcgcaggcctgcagatcgacaacttcgacttctactacacctacggccttttccgcctggccggcatcgtgcaacagatctactaccgcttcttccatggccagacccaggacaaacgctttgcgcagttcattcacatgaacaagctgctcgagcagatgagcctgaacgtcatcagcaaatcgtccctttaaggaaccgctatgtccaagacccacctgttcgacctcgatggcaagatcgcattcgtttccggcgccagccgtggcatcggcgaggccatcgccaagttgctggcccagcaaggcgcccacgtgatcgtctccagccgcaagctggaaggctgccagcacgtcgccgacgcaatcatcgccgacggcggcaaggccacggccgtggcctgccatatcggagaaatggagcagatcacccaggtattcgccggcatccgcgagcagttcggccgcctggatatcctggtcaacaacgccgcgaccaacccgcaattctgcaacgtgctggacaccgacctcggtgcgttccagaagaccgtggacgtgaacatccgtggctacttcttcatgtccgtggaagccggcaagttgatgcgcgagaacggtggcggcagcatcatcaacgtcgcctcgatcaacgggatctcgccgggtgtgttccagggcatctactcggtgaccaaggccgccgtgatcaacatgaccaaggtgttcgccaaggaatgcgcggcgttcggcattcgctgcaacgccctgctgccgggcctgaccgacaccaagttcgcctcggccctggtcaagaacgactcgatcctgaaaatggccctggcgcagatcccgctcaagcgcgtggccgagccgagcgagatggccggtgcggtgctgttcctggccagtgacgcgtccagctacaccaccggtgtatcgctgaatgtggacggtggtttcctgtcctgatcaggcattcggcggctgttgccgaaagctcaccgccaggcggttccagccactgatgctggacaccgccatggtcaggtccaccagttcctgctcgctgaactccacacgcaccgccgcatacagctcatccggcaccgtcgaggtgggcagcgtcgccaccgactcgctccaggccaatgcagccttttcccgcgccgtgaagaacggcgaatcccgccatacgctcaaggcaaacaaacgtcgctcggtttcgccgcgttgacgcgccgccatcgagtgcatgtccgtgcagaaaccacagtagttgagctgcgatacacgaatcttgatcagctccagcaaaggtttttcgatggacaggtcgaaggtcgtcgcctccagcatcagcatgcccttgagcgcttgcggcgaggcggtgtagtaatccaggcgaggttccatgggcgtttctctgaggttgcggcaaggacagtccagcctagagcccgcatggaataagccctatagccaatcggccggtttacgcacagaccattttgcgccagccctgcacgcgcgtactcttggcgcagattgaatgccctgggacaagtcatggaactgcacgttgtaatcaatggccgcaaggacctggccgaacagctctatcaacagctgcgcgaagccatcgggtccgggcgcctggccgccggcgcgcaactgccgccaagccgtttgcttgccgaacaattgggcgtgtcgcgcaagaccgtgtctgacacctacgccacgctgacctacgaaggcctgctggtgggcaagaccggtcgcggcaccttcgtcaacgcaagctcgccgcagtccgagcgcgtgcaaaccgccgccgacctggcctgtgccgccaacctggcgaaatggcaggcgctgccctcgccgatgcgtcatcccacacgcgatagcaccttgcgctatgaatttatcggcggcgccaccagccgcaaccagttcccccaggacgaatggcgccgctgcacccaggacgcgctgcggcgcattgcccagaacagtggtttctacagccaacccgagggcttgccggcgctgcgcagcgcgatcgccgggcacatcgcgttctcccgtggggtcaactgccgcgacagcgacatcgtggtcaccaacggcgcgcaacaggcgctggacctgattgcccgcgtggtgctggaaccaggcagcattgtggccatggaagaccccggctacagccctgcccgccagatgttcatcgcggtaggagcccaggtcgccagcgtgccggtggacgaacagggcatccgggtcgaccggatccccgatggcacacggctgatctacgtgacgccctcccaccagttccccctcggcatgccgatgagcctggcacgtcgcgaagccttgctggcgcgtgcgtttgcgctgggcgcaatcatcatcgaggacgattacgacagcgagttccgttacgaaggacggcccaccgactcgctgcaaagcatggacacccgtggcgtggtgacctatgtgggcaccttctcgaaaaccctgctacccgagctgcgcctgggctacgcagtgctgccgccggccatctacggtgcggtgctcaaggccaagcaattgaccgaccagcacagctccaccctgccccagtgggcgctggccaagttcatcagtgagggctacctgctcaagcacatccgtcgctgccatacggtctacgccgggcgtcgcgaacgcatcctgcaacgcctggcgggggacctgtcgccgtggttcgaagcggtgccgaccgtggccgggttccacatggcggcgctgtgcaaggtgccggtgaatatcccgctgctgatggagctcgcacgccgggtggaagtgggcttgtaccccctggatgtgttcttccacgacgcgccggtacgctcgggcctgatcatcggcttcggcgcgatcgagaccctggacatcgacccggcgctggacaaggtgcgcgatattctccagcagattggctagcgaattttccgccggattggtcattggtcctgtcaccatcaggctctagcctgtgcactgccacccgacctcggagaccatcgccatgcaagcctttgcctataacactgtccatatccgcgcggcggtcgggcgctcatcggaactgggcgaacgcctgcaagggattgtcgacgccgtacgcaccgcgcccggttgcctggattacaccattcagcgcgacccggtggaccccgacctgtggaccgtcaacggccgttgggcctgcgtccgacaactcaacgcccacttcgcgctccctgcgctgcaggggttcatcgaactgacccgcgaacacctggccctccgcctggaattcgaccactgaggcattggcctcctggtcttcgcagggattggtcattggtcacccaggccttgcggcgtagggtgaacaggtctcgaactactcggaaacttcatcatgaaacgattgctcgccgcctccctaatgctcgcctcgctcagcgcctttgctcatgaaccggtgtacaaccaggagtcgatcaaggtcttgcaggagcacgcgctgaccaatgtcccgggcaagaaaaccctcatgctcaccgtcgactatgcccccggccaggccaccgtgccccacagccacacgggcaccgccgtggcctacgtgctggaaggcgcgatcacttcacgggtgaatgacgagcccgcaaaaacctacaaggtcggcgagtcgttctacgagccggccggttcccggcacttcgaatcgagcaatgccagccagacccaaccggccaagctgctggtggtgatggtgctggatgacaaggccgaggtgcttacccccctgcccaagtaacccgccacgccacaaaccagaaaggtgggagggggcaagccccctcccacattttgatttgcatcggtcagtgactcaggggcgctggaactggcggcgcaggccttcgatccgctcgcggcaggcgcaaccttccaagtgatcattgaccatgcccatcgcctgcatcaacgcatacatcgtggtcggccccacgaacgtccagccgcgcttcttcaaggccttggacaagcgcactgaggccggcgacgtgggattgcccgtccagtaagccatgtccaccaccgccggccgttcctcctcaccgggttcgaacgcccacaaccagcgcgccagcgacccggtctcatccaccagctcacaggcgcggcgcgcattgttgatcgtggacacgatcttggcccgattgcgcacaatgcccgggtcctgcatcaagcgcgcgatatccgcctcgccgtactgcgccacccttatgaaatcaaagccctcgaatgccgcccgaaactgttcacgcttgcgcaaaatggtgatccacgccatgcccgcctgaaagccttccaggcagatcttctcgtacaactggatatcatccgccaccggcacgccccattcggcgtcgtggtaacgcgggtattccggcgccgccgtgcgccagctgcagtgggtgtgcccattgtcgtcagtggtcagtcctggtgtgtccatccatcacctcatgtgccgagcagcggatgataagcgaaaaaaattccaccccgccaaccgctcaagcatcgcccttaccgaccaactggtcagaccgggacctgtcaaccgccaaataattgcttgtgatttcaaaaataccgggcgtagactggccccgcactggacttaccggtaagaccacaacaattaagccctggaaccaccagggcaccgaatagagatccctcccatgctcagatggtgctcgcgttcgattttcctgcaagtcgtgattggcctgatgctcggcatcgcctgcggcctggcccttcccgaattctcctcgcaactcaaacccctgggtgacggctttatcaagctgatcaaaatgctgatcggcctgatcgtgttctgcgtggtggtcagcggcatttccggcgccggcgacttgaagaaagtcggacgcatcggcctcaagtcagtgatctacttcgagatcctcaccaccgttgcgctggtgatcggcctggtcatggccttcagcaccggcatcggccaaggcgccaatatccacctggaacaattgtcctccgctggtttgaatgaactggccgacaagggccagcacatccgcggcaccagtcagttcctgatggacctgattcccaactcggtcatcggtgcctttgccgacaacaacgtgctgcaagtgctgctgttttcggtgctgttcggcagcgcgctgaacctggtgggcgaagcggcgtcgggcatctcgcgactgatcaacgaactgagccatatcattttccgcatcatgggcatgatcgtgcgcctggcgccgatcggtgtgttcggtgcaatcgccttcaccaccagtacctacgggctggactcgctgcagcacctggggagcctggtgggcctgttctacctgacctgctttgccttcgtcgcgctgatcctcggcctggtgatgcgcctgtcgggcctgcgcatgttgccgctgctcaagtacctgcgtgaagaactgctgatcgtgatgggcaccgcttcctccgacgccgtgctaccacagatcatgcgcaaactggagcacctgggcattggcagctccaccgtcggcctggtgattccaacggggtattcgttcaacctcgatggcttctcgatctacctgaccctggccattgtgttcatcgccaatgccaccggtacccccctgtcgatgaccgacctgttgacgatcctgctggtatcgctgatcacctccaaaggcgcccacgggattccggggtcggcgctggtgatcctggcggcgaccctcacggcgatcccggcgattccggtggtgggcctggtgctggtgctggcggtggattggttcatgggcatcggccgtgcattgaccaacctgatcggcaactgcgtggcgaccgtggccattgcccgctgggagaaagacatcgacatccagcgcgccaacaaggtgctcgacggtcagcaaggctatgccttccaggccaagaagccggtgttgcccgcacaccaggagttctgaaatgtgggagggggcaagccccctcccacacatccattcgcaacatcaaggagacgcacgacgtgatcagcacctcaaccgtcgtcaattcagtcgtagaaaaactccgcgccgccttggcgcgtggtcagtggcgccggggtgaaatgctccccggccagcgcgaactggccgaacagatgggcatcagccgccccagcctgcgtgaagcggtcatcgtgctggagaccctcggcctggtgcgatccatgcccggcaaaggcgtggtggtgctggaaaccagcgtcagcgaaccgcagtccagcgatgccgtggccgacgccagcctggaagacatcctgcaactgcgctacaccctggagccgttcattgtcggcctggtggcccagtccatcagcagcaaagaggtcggccaactgcgcctgaccttgatggacatgcgcgaagccctcgatgccggtgacgctgaagcgggcatgaacgcctacatcggctttcacgaggaactgttcgccctcacctccaacccgatcttccagaacgtggtgcagcagaccagcaacgccctcaagcaaagcgcccaggtgctgcgcaactcgcccgaacacctggccgaacgcctgcaggaaaacgaagccgtggtgcgcgccatccgcaacaagaacagcgccctggcgagtgccgagatgcgccggcacatcctgcaggaaggcctgcgcatgggcattgccctgaacatcccggacgaccatctcggcagctgattttttggagacaggccatgaccgcccacgccttgcactacgaccccatcctgccgaccctgcgcctggtcgccggtaaaaagccttcggtggatgacatctacccgcgcttgttcgacgccatcctcgaacaacgtatcgccccggccagccgttttaccgaagaaggcctgggcgaaacgtttggcgtgagccgcagcgtgatacgccgggtgctggccaagctgtcccatcagcaagtgatcatcctgcgccccaaccagcgtgcccaggtggccgcgccggatgctcagcagacgcgacagatcctcgaagcgcggcgcatgaccgaaatcactgtggtgcagttggcctgcgcccaagcgacagccacgcagatacgtcagttgcgcgaactgattgcacgggaacgtgattgcatcgaacgcgatcagcgtgggccggcgattcggttgtcgggggagtttcacctgcatttggcgacgatggccggcaatgcgccgttggcgcagttcctcaacagcctggtgccgttgacgtcgttgatcattgcccagtacgaggcaaaggcctgcacgtattgcgcgtggcaggagcatgtggcgattgtggatgccgtggagcagcgcgattcaaacgctgccgtggccctgatgaaccagcacctggctcacctggaaagcaaattactgaaacaccactgatatccagataataaagatccaaatgtgggaggggcggtgcgacgattcgacttgcccccgatggcagtgtgtcaatcaatgaagatgttgactgatacaccgccatcgggggcaagccccctcccacattggtttcaccaggggtctaggccggttgcaacaccgactgcccactcaacgccaggtccagcaactcacggttggctaccgcgtacatggcgtagtccgtgccgaccgcagcacggatttccaccatcatcgccacccaacgctcggccatgtccttgtgctgctcaagccacagggccacgcgggcttccatgtcttgtggcgcatcggccatttgcaggacggaaatggtgatcgcgcgttgctgccagtccacatcgtcgcggaacgcttcgcgggcctgggcctgccagttgttgcccaccggcagatcactgatctgctgcaggtaccacggcaagtccaaggcgctgccgacggcgaagtaggccttggccacttcggcggcgtcatgcccggtcacgtcagcggcttcaatgatcggcagcaaggtgtacaggtgggtcgtgccagcaaccatgcgcgccaacagttccggtacgccggcttcggtgtaggcctggtagcgcttctgccagccttcgcgggtcgggccttccagcagttcgtcgagcttgaggcccagcgccgccaggtgcggaccgaagtgcgcggtgtcacggccagcgtcctgctcgttgcgacggctgcgcaggaaccagcgcgtggcacgacggcccaggcgcatcagctcgtccatcaactgcaattgcacgtcggcggagacctggtggtccagggcttcaatctgacggaaccagtgcgggaggtggaagatgtcacgcacgatcacataggcgccagccacgttcgccgggctcatgccggtcgactctttgagtcgctgcacgaaggtgatgcccatgtggttgaccaggtcgttggcgatctgggtgctgacgatctcgcgcttcagacggtgacgacgcatggcctcaccgaacttggcgaccaggctcggcgggaatgcggtctccatgtcacgagtcaggtaatcgtcatccggcaccagcgacttgagcagcgcttccttgaggtcgatcttgctgtacgagatcagcaccgacagttccggacgggtcaggcccttgccgttggcggcgcgctcggtgagctgctcctcggtcggcaggtactcgatagcgcggtccagcttgccacggccttccaggtcgctcatcaggcgcttgtactcggcggcacgctcgtaggcacggcgcgccgccagggacagggcctgggtctgcttgtagttgttgcccaacaccaggctgccgacttcgtcggtcatgctcgccagcaactggttgcgttgcttgtcggtcatatcaccggcctgcaccacttcgttgagcaggatcttgatgttcacttcgtggtcggagcagtccacgccaccggcgttgtcgatgaagtcggtgttggaaccgccgccattgaggccgaattccacacgacccagctgggtcatgccgaggttaccgccctcgcccaccaccttgcagcgcagctcgttgccgttgacgcgcagcgcgtcgttggccttgtcgcccacgtcggcatgactttcgctgctggccttgacgtaggtgccgataccgccgttccacaacaggtccaccggcgccttgagcaaggcgttcagcagttcagtcggggtcagcttgtcggccgcgatgtcgaagcgttctttcatctgtggcgagatggcaatgctcttcgcgctgcgcgagaagataccgccgccttcggacatgatgctggtgtcgtagtcggtccaggccgaacgtggcagctcgaacatgcgctggcgctcgacgaagctggtcgccgggttcgggtttggatcgatgaagatatgcaggtggttgaaggccgcgaccagttgcagcttgtcggacatcaacaagccgttaccgaacacgtcgccggccatgtcgccgacgcccaccacggtgatgctgtcttcctgcacattgatgccgcgctcacggaagtgacgctgcacgccgacccacgcgcccttggcggtgatgcccattttcttgtggtcataaccggcagaaccaccggaggcgaacgcgtcacccagccagaagccgtagtcgatggcgatgccgttggcgatgtcggagaaggtcgcagtgcccttgtctgctgctactaccaggtacgggtcatcgtcgtcatggcgcacgacgttggccggtggcaccagggcgccatccttgaggttgtcggtaatatccaacaggccggaaatgaagatgcggtagcaggcgatgccctcggccgcgatctcgtcacggctgccgcccaatggcaggcgacgcggcaagaagccgcccttcgcacccaccggcacgatgaccgagttcttcacttgctgggctttcaccaggccaagcacttcggtacggaagtcttcttcacgatcggaccagcgcaggccgccgcgcgcgacgttgccgaagcgcaggtgcacgccttcgacccgtggcgagtacacgaagatttcgaacttcggcacaggcttgggcagctcagggatcgcgtgcgggttgaacttgaagctgaagtacgacttgttctggccgttcgcgtcggtctggtagaagttggtacgcagggtcgccttgatcaggtccaggtagcgacgcaggatgcggtcttcgttgagcacctggacgtcgtcaagggcggtgaggatcgcttgttccagacgttgctgcttgtcttccaggtcgtcgctggtgagcttgcgcgccaggtagaaacgggtcttgaacaaccgggtcaactcgcgggcgatgtcggtgtggttgttcagggtgctggcgatgtaacccaggtcgaagcccaggcggatctgcttgaggtagcgggcgtaggcacgcagcagcgcgacgtcgcgccacggcaggccggcggtgagtaccaggcggttgaacgcatcgttctcggcgtcgccatgcacgatgtgcacgaatgcgtcctgcagagtgtcgttgagctgctggatatccaggttcacgccctcggcggcgatgaacgcgaaatcatggatccagaactcgcggccattggcgtgacgcaggcgatacgggaactcaccgagcacgcgcaggccgaggttttccaggatcggcagcacgtcggacagcgccagcggggtgtcggcgtggtacagcttgcaatgcagctcgcgctggccggaaacctggcccagcggctgatagaaactcatcaccagcgggttggcctcggtgaggctgagcaagtgctgcatgtcgaccaccgccgaatgcgcggcaaagcgctcgcggtaaccggccgggaagcctttcgggaagtccgccagcacgttggtgccatgggcttcgccgaagctttcgacgacgaggctggagtagtcgtcctgccagctgcggcaggcctgcaccacttctttttccagttgcagcgggtcgatgtccaggcggttcttcgggtctacccgcagaatcagctgcacgcgggccagcacggactcggagaagaaggtccagaactcgcagtccgaagccttcaggcgatccatcaatacttgctggatcttctggcgcacttcggtggaatagatgtcgcgtggcacgtaggccaggcagtagcagaatcgaccgtacgggtctttgcgcaggaacacgcggatcttgttgcgttcctggatctgcacgatcgacatcacggtgctgaacagctcgtcgaccggggtctggaacagatcgtcacggggcagcacttcaacgacttgcgccaactccttgcccaggtgcgccttgggctggaagccggagcggcgctcgatttccgcgaccttgcggcggatatacggaatcacccgtacgctttcgccgtacaccgacgaggtgtacaggcccatgaaacggtgttccttgatgaccttgccatcggcgtcgatttcacggatcgacacatagtccgggtaggctggacggtgcacgcggcttgggtgcgcggccttggcgaacgaaagcatggtcggttcacgcaggtaggcgacggcatagtcttcgatacgcaggtcttcggcggtgagcccggcgcgcagcagtttggtcagaccgaggaaggagtcggcgtcatattcgatatgaccgccatccgcctcgtcacgtaccacgaactcttcatagccgaggaaggtgaagtggttgcccaccagccattccaggaagttcttgatctcggccttttcttcgccgtcgatggcgaactggcttgcgtcgataccggccagcaggtcctggaccttggctttcatcggctcgaaatcggccacggccacacgcacttcacccaacacctgctcaagctctttgctcagcacgttcagttcggcggcgttggcgcaacgatcgatttccaggtacatcagagattcttgctggatgccttcgccctgggtgccttttggcaggatttccagcaactcgcccttggcgccacggcgtacgctgagcacggtggtctgcaaggtgtggatgctgtagccacggcggttcagctcggtgcggaccgagtccaccaggaagggcaagtcatggtgcagcacttcgaccgcggtgtgggtcgactgccagccatgacgttcgtaatcggggttatagacccgcacttgcggttgggtgtgatcaaagcgctcaagcaggcgccacgcagagagggtgcaaccggccaggtcggaaaggcgacgctgggtcagttcgtccagggaaatgatgccgaagaattgttcagcgaacagcgccacttgtggcagtgcctgttcactgatgtgctgcgccagtgccgcttgcagttgatgctggaagtcggccttgctggctgcggtgaaaaacgccatctgtggtactccgctcgggcttgttattgatggaagcgtcgcgtgttatccccttgcggggagaccgtcagcgctgttcgctgggtgacgagtaaagcaccataaacgaatcagggtgacaggtgggtgaagctggacaagacaatgaggtcacatacaacttccataagatgtgcacctagccgggtgacggtacgacgggcaggtcaggcgccaggctcgtgcacatccgttgcgcagcttaacgagtgtaggaagccagctgcttgcgacgctgcgacatattcggtcatcggtaagcaggcgccgggttgcgacttgggcaacccgtcattcccggcagaaaatccggctacttcgacgccggcgagtatcagaaatgaccgatgttgcccgtcaggtcatgcactgggtctgacacaggaagcagcacaaaattcgccgcaatggcacaattgcccgcatcacgccctaccccagacaggattgcccatgctgcaactgaaaaccgacgccctgatggccacgccgtgcgacgacgaagaagacaacatggccatgctctgctgccacggcaagaacggcgagatgttcatgctcacccgttacccggacgaagacgaagtggaattgacctgggactacgagccgtcgacgctggatgggctgaaggtcacgctgagtgacaccatcctgctgatcgaactggctgccggggatgccgatgccctgggtggcaaggaccagttgcagattacccacgccaccgctgcgtcggacctggtcgaagtcgagcaaaccctgcaaaacatcctgaaaggcaccggcactttcacccgaatttaaacggcacccacaatcaaatgtgggagggggcttgccccctcccacatcgaccgtgttcccacacaaatttcctacaagatttgccaaaaatacccgtcacgccgttagtcgccacccccctccatgcattaaagtagacgccccaggccttggcatttttcacaaccccaaggctcatctctccaggaaccgtcatcgatggaacatcgtgaagcgctgcttgcgctgcgaacctttctttctacgcagattctcggccaggaaaaactcatcgatcgcctgttgatcgcgctgctcgccgacggccacatgctggtggaaggcgcgccgggcctggccaagaccaaggccatcaaagagttggccgaaggcattgaagcgcagttccatcgtatccagttcacccccgacctgttgcccgccgacatcaccggcacagagatctatcgtccggaaaccggcagcttcgtgttccaacaggggccgatcttccacaacctggtgttggcggacgaaatcaaccgtgccccggccaaggtgcaatcggcactgctggaagccatggccgagcgccaggtcagcgtcgggcgcagcacctatgacctgtcgccgctgttcctggtgatggccacgcaaaaccccatcgagcaggaaggcacctacccgctgcctgaagcccagctcgaccgtttcctgatgcacgtcaagatcggcttccccgacgccgccgtcgagcgacgcatcctgcaacaggcccgtggcgaagcgctcaacggcgaaaccaagccggaacgccgcgtcagccagcaggcgatcttcgccgcacgcaaggaaatcctcggcctgtacatggctgacgccgtggaggaatacctggtgcagttggtgatggccacgcgcaccccggccaagttcgacccggagatggccgagtggatcgcctacggcgccagcccacgcggctccatcgccctcgaccgctgcgcccgtgcccatgcctggctggccggtcgcgactttgtcagcccggaagacatccaggcggtgctgttcgacgtactgcgccatcgcatcatcctgtcgttcgaagccgaagccgccggcatcgaccaggaccgcgtggtgcaacgcattctcgacgtcgttgccgtcgcttgaaacccatgaacgccagcgatggggtccgcgtcacgctcagcgagttgatcgagatgcgccatcgcgtgcgcgaagtgcagctgttttccaccccgagccagcgcagcccgttgatcggcctgcaccactccaagctgcgcggacgcggggtggacttcgaccaggtgcgcgtgtaccaggccggggacgatgtgcgcaccatcgactggcgcgtgacggcgcgcacccaggagccgcacaccaagctgttccatgaagagcgcgagcggccgatctttatcatggtggaacaaagctgccggctgtttttcggctccgggcagatgttcaaggcggtgctcgcagcgcaggcagccagcctgatcggctgggccgcgctgggccacaacgaccgcgtgggcgggctggtgttcggcgacagcgagcactacgaaatcaaaccccggcgcagcaaacaaagcctgctgcaactgctcaaccgcctggtgcgagtcaaccagagcctgaataccgagagccgccccgaagccgacgccctcggcatggccctgcgccgtggccgcgaagtgttgcgccccggcagcctggtgattgtgatctgcgacgaacgtgcgctgaccgagggcgccgagcaacaactgagcctgctgtcacgccactgcgacctgctgctgctgccgatctccgacccgctggaccacgccctgcccgccgccgggctgctgcgtttcgccgaacgtggtgcgcagttggaactggatacgctcaacttcgacctgcgccaggcctacaaggcccaggccgaagcgcgcattgcgcgctgggaactgctcgcgcaaaagctgcgtgtgctgttgatgcccttgagtacccagagcgaaatggtcgagcaactgcgtgaatacctcaacccgcaacgcccggttaaaaaacaatgagcagcctggaccaactgcagccgctgatcgccccgcccgccatcggcttctggccgcctgcgccgggttggtggctgttgctgctggcgattccgctgctcggttggggcctatggtcgctgcgccgcttcctgccggcccgccgccccgtggcgcgcgccgaacaaccgctggacccgctgcgcattgccgccctggcggaactggcgctgatgcccaaaccctacgacggcgcgcctgccggcgcctggctgcaacagctcaacggcctgctcaagcgcctgtgccgcaacgactacccctacagccagagccacaccctcaacggccgcaaatggctggcattcctcgacaaccgctgccccgccgccggcctcacgcgctggatggtgttggtggaaggcgcctacaaacccgaatgcaaactcgacgacaaggccatcgccggcctgacccaagcggtcgatacctggattcgcaaacatgtttgaattcgcctggccgtggatctttgccctgttgccattgccctggctgatgcgcctggtgctgccggcagccgacagcggtgagcccgccctgaaagtcagctacctcagcgacctcgaaggcctggcccgccgccgcgcccgcgtcaacctgccaggctggcgccagcaagcaccgttcgtggtgctgtggttgctgctgctgaccgccgccgcacgcccggaatggctcggcgaaccgctgcccatcgccgccagtggccgcgacctgctggtggcggtggacgtgtccggctcgatggattttcccgatatgcactggcaggacgaagacgtgagtcgcttgagcctggtcaagcacctgctcggcgattttcttgaagggcgccaaggtgatcgcgtcggcctgatcctgttcggcagccaggcctacctgcaggcaccgctgaccttcgaccgccgcaccgtgcgcacctggctggatgaagcgcgcatcggcattgccggcaagaacaccgcgattggcgacgccatcggcctggccttgaaacgcctgcgccagcgtccggcgcagagccgcgtgctgatcctggtcaccgacggcgccaacaacgccgggcagatcgacccgctgaccgctgcgcgcctggcggccgaagaaggcgtgaagatctaccccatcggtatcggcgccgatccggaacagaccggttccctgggcatcctcggcgtcaacccgagcctggacctcgacgaaccggcgctcaaggccatcgccgaagccactcatggccagtacttccgcgcgcgcgatggcgaagagttgcaagcgatcaagcaaaccctcgacaagctcgaacccgtcgaacaacaacccacccaggcacgccccgccctggccttgtacagcgcgccgctggccctcgcgctggtgctgagcatgttgctggtgatccaggaacgttggccgaacaacgccctgcaacgcgtgttcaataaactgtcgagcaagggcatgttcctgcagcaacacccggaatggcgccaacgccttaaacgcctgcgtttgcggaggcgtcgatgatcgacctgtggccgcactggttccgtccctggtggctgttgctgctgccgttgctcggctggctgctgtggcacctgtggcaccggcaaaagcgcgccgggcgctggcagatgatcttgccgccggccttccacgcggtattgctcagtggtggcaacggccgcgagagtaaatcgccttgggtggtgctcggcatcgcgtggctgttggcggtgctggcgttgctcggccccagttggcaaagggttgaacagtccagccagaagccgtccgacccgttggtggtactgctggaactgaccccggaaatgctcgccaccgacagcccgcccaaccgcctggagcaggcacggcgcaaactgtacgacctgttgcaggcgcgcaccgacgcgcaaaccgccatcatcgtctacgcgggcagcgcccacacgctggtgccgctgtcggacgacctggccaccagccgcaacctgctggaagccttgcgcccctcgatcatgcccgaaccgggccaccgcgccgacctggccgtcgagaaggcgctgggcctgctcaagcaaggcggcctcggccaggggcgcctgttgttgatcggttcttcgttgtccaaacaggagcgccagggcatccgcctgctgctgcaaagcggccaggcgccgagcttgtcgatcctcggcatcggcagccgcgagggcacgccggtgacccaggagagcggcgaattcctcaaggacgaacaaggcgcgatcctggtgccgcgcctggacagcccgaccctcaaggccttcgccagcgaaatgggtggccgctaccgcgctgcgcggctggacgacaaggacctgcgccagctcggcgtgctcgacccaccgcaagccctgcgcaacgatggccagttgctgcacctcgacacctgggccgaccagggttactggctgctcctgcccctgctgctgctggccgcctgtgctggccggcgtggctggctgttctgcctgccgctgctgttgttgagcgcgccgcagcccagctatgcgttcggcttgcaggatttgtggttgcgccccgaccagcagggccaatatctgctgaagaaaaaacgccccgccgaagccgccgaacacttccaggacccgcaatggaggggcgtggcgctttacgaggccggcaactatgccgaggccatcaagctgttcgccgagggtaatgacgcctactcccactacaatcggggcaatgccctggcaaaatccggtgaactggaagccgccatcgacgcctacgagcaagccctcgaagcccagcccgatctgcaaccggcgctgaaaaacaaagcgctggtggaaacccttatgcaggaacaggcccaaccggagccgcctcctgcggcaaaaaacgaggatgacgaaaccacccaacccggccaaactgcgcaaccgggcggcacggggcaaaacgccacggggggcgaacagtcatcccaaggccagggcgaagccggcactggcgacacccagcccggcaacacgccgcaaaccgcgggcaatgaagtgccgggcagcgaactgggcgacgaacagaccactaccccgccgctgcggcccaacgatgccagccttgacggtgaacatcgccaggccctggagcaatggctgcaggagatcccggacaaccccggagaactgctgcgccgcaaattctggtacgaacagcaacaacatcaggacaagactcgatgagccgccgcaccaccctactgtttctgctcgccctgtcggcaggccacgcccaggcggcgagcctggtcgccagcgtcgaccgcagccgcgtcaactccggggaaacggtggaactcacggtggaatccagcgacgtgacccagttcggcaagcccgacctgtcgccgctggatgcacagttcgaagtcagcggcacgcggcagatcaaccagctcaccacgctgggcggcgacaaccacgccaccacgcgctggatcatcaccctgctgccccgggaaaacggcacggtggtcatcccgcccctgcaagtgggcgaacacaagacccagccgatcagcctgcaagtggtggaaaccgccagccagaacactgctgccgagctggcgccagtgtttgtcgaggccaacctcgaccagaccagcgtctacgtccaggcccaggcgctgttgaccgtgcgcgtctaccactcggtgtcgctgtatgacgacagcagcctcacgccgttgcagattgccgatgcacgcgtggagcagttgggcgagtcgcgcacctacgaaaaggtcatcaacagcatccgccacggcgtgatcgagacccgctacgccatctacccgcagcacagcggcacgttggcaatccctgcgcagactttcagcgcgacgctggtggaatcgcgcccaccccaggaaaacaccctgcaaggcaccaagccgggcaagttgatccacgtgagttccgcagagctgccgctggtggtcaaacccaaaccggcgctgtaccccgccgatacgccgtggttgccggcacgcagcctgaccctgagcgaaaactggaaccccgaacccgagcacgtgcaagtcggcgactccctgacccgcagcctcacggtcaaggccgaaggcctgtccagcgcgcaactgccggcactgcccagcaccgaagtcaacggcctgcgccgctacccggaccagccggtgctcggcaaccagaccaacgaccgcggcctgatcggcagccgcgaagaccgggaggcgctcgtgcccacccgcgcaggtaacctggaactgcctgccgtggacgtggtgtggtggaacacccacgaagaccacctggagcgcaccagcctgcccgcccgcaccgtgcaggttgccatcaacccgagcctggccgtggatacccccgccacaccgacggtgatcaccgcaccggacgatgagcgcctgtggctatggcaactgagcacgctgatcctggcctgcaccaccctgctggggtttggcctgtggtggcgtgcacgtcggcaaccggccgtgcagcgcgccgcacaaaccggcccgagcccgcgcaccctgctcgatgaccttaaacgcgccacccaggccaacgacccccaagctacccgccaggccctcgacgcctgggcgcggcaacagccggaaaccctggcggatatggcggcgcggtttgtgccgctgtcggacgcgttggacgggctgaatggtgcgctgtacagcgagagtgggcatttctggctgggagaggacttgtggcgtgcggtgaaggcaattccgatggctgagcgtgaggtggatccgacggcggataccaccagcttgccgccgctgtatcccaagtagccaaggtgactacttaagataggacaggcgtggccgataaagcgatgtagctttcgattaatggagttttttaaaatggccattacgttgaatgtttcctatccgcctttaagtaagcagacagacgcttacgccatcaaaaacccgcagcaagtcacgaatgccttcactattaccgaagcctccgaggcggcggatacattgaagcttggcgatcaggagaagatcagtcaacttaaggagtttttgaaagattatgatatgacgtcaatcagtacggatgagcttaagaaagtcggtagaaggctctacgatgacggaatgatcagccaacgcgcttttgggatgttcatttcgggtgatggtgcatcagatgccaatggtcgccaaacaaacacccacgtaaaatttaatgccattgccctattcaacgagaaactggaagatacgcgggcttttttcaaaagtgaaccaatggttgcaatgcaagacggtgccatggatcacttgcaagggatggtcagcgcaaatcaagctgttggtgcattggcgtattttgtcaagtccgctaataatgatttatcgataaatgagtacgcttgaatttgatttatgagtcaaggcgcgccaggttcaacctgacgcgccgcctgctcatctagcgtccgtatctcaccgtacctgaataggatttagacgcgctggtttcgtttttcagccttacacgataggtaccgaatggccccacgtaagacgcgttagtgccgatactgaatgacactctgctccaggatgagcctacttcacgctcgataaaaatcgccggagcacttcccgctcctcccgctgaaaccgttgcatcgatattcgcggcagaacagccattggctccggttattttaaatggaccatataccgtaatctcatcattgggctgcattatcccggtataactatcagcaatattcaaacacaacgcagatgcctggaatgaaacaagcatcaatccagcaagcggcaatgcaataaggcttttcataatagtctccatcagtattaagaaaacacaaaagcgcatcacgcaaggagcgcgtcaattgaccactccacgcttgccagactgcatgaattatttatcaaagtaagccagccgcttcctaaattctggaaggaaaggcctgtcattttttagtgtaggaacaagtaaggcgcgtcctaatcctgcctcccacttataagatcggtatttaatagcattttactttgcgtttttttcagataaatattctaacccttggcacggggcggtttactcgcgaatgcggtgtgtcagatagaaatgcactgcctgacccaccgccacccggagcaagccccctcccacattgaatctgcgtcgcctgggggcagcagggtcgcattacaggtaaactcccctccttttcatctattccacggagttcgccttgcgtctgtttcacacctccgactggcacctgggccaaaacctccacggccaggaacgcgacttcgaacacgcctgtttcctcgagtggctgctgggccaactcaagacccatcagccggatgctctgctcatcgccggcgatatcttcgataccgtcaacccgccgctcaaggcccaggagcggctgtatgacttcatcatcagcgcccacgaacaaaaccccaagctgaccatcgtgatgatcgccggcaaccacgattccggctcgcgcatcgagctgccggcaccgctgatgcgccgactgcgcactcatgcgctcggccgcgtgttatggctggatgacggccagctcgacgccgaacgcctgctgatcccgctgcccgatgccaaaggcaagattgccgcctggtgcctggctttgcctttcctgcgcccggcggaagttaccggcgcgcacctgggcgacgattacctgcgcggcatcggccaggtgcatgaatggctgatcgctgcggccaatgccaagcgcaaaaaaggccaggcgctgattgccatcagccatgcacacatggccggtggttcggtgtcggaagactccgagcgcagcctgatcatcggcaatgccgaggcgctgccggccagcttgttcgataaaagtgtcggctatgtggccctcggccatttgcacaagccgcagaaggtcaatggcgaagagcgtattcgctacagcggttcgccgatcccgctgtcgttttccgaaatcggctacaagcaccagatcctcgatgtggtgttccagggccaatgcctggtgagcgtcgagcccatcctgattccgcgttcagtcgacctgcaacgcctggaagccgtgcccctggccgatatcctcaaggccctggccgagttgccggacatcgacctgctcgccgaaacccaacgccacccctggctcgaagtgcgcgtcctgctcgacgaaccgcaacccgacctgcgccagcaaatcgaagccgcgctgcaaggcaaggcagtgcgcctggtgcgcatcgccgccgagtacgccggtaaaggcccccgtgaagacgaaggcgacgaccgcctgatcgaactcgaccagctcacgccccaggaactgttcagccgcgcctggcaggacagctatggcagcgaggtagatgaacagaccttgaaggacttcgccgtgttgctccaggaagtgcagcaagagggggaacagccatgaagatcctcgccatccgcctgaaaaacctcgcttccctggccggcccattcgagatcgacttcaccgccgaacccctggccagtgcggggttgttcgcaatcaccgggccgaccggcgccggtaaaagcaccttgctcgatgccttgtgcctggcgctgtttggcgccgtgccgcgcctgggtgataccggccaggcgaagatgccggatgccgacagcgacatttccatcggtgacccacgcaccttgctgcggcgtggcaccggcggcggttatgccgaggtggattttgtcggcgtcagtggccgccgctaccgcgcgcgctgggaagccaaccgcgcccgcgacaaggccagcggcaagttgcagaacagccgccagagcctgatcgacctggacagcgaccaactgctggccagccagaaaaccgaatacaagacccagctggaactggccctgggcctgaacttcgaacagttcacccgcgccgtgttgctggcgcaaagcgagttcagtgcgtttctcaaggccaacgacaacgagcgcagcgaactgctggaaaagctcaccgacaccgcgctgtacacccagcttggccgacgcgccttcgacaaggccaaagaggcccgggacgcgcacaaacagttacaggaccaggccaccggcgtggtgccgctggccgctgaagcccgtgccgaactcgatcaacaattcgatgccgcgcagcaacacctcaggacccagcaggcccaactcaagcagctggagcttcagcacacctggctcaaggaactgcgcgaatggcaggaacgccaactcgccgccaccgagcagcttcagctggcgcaggccgagtggaataaccaggacgcgcagcgccaggacctgagccgcctggaacagttggcgccgcagcgtcatctgttcgtgcgccaggcggaactcggcacacagctggcgccgttggcggcgcagattcagtcgcatacccggcaacaagacgaactacacacccgccaggaacaggcccggcaccaacaaaccaacgcgcaaaccgccctggctgaagcgctgaacaaccaggcggatgccgcgcctttgctgcgccaggcgttcgacgaacaaagcaccctcgcgcacttgaccaaagagctggccaagcgcaccgaggacaaacagcggcacgcaagcgcctgcaccgaaggccaggcccagctcactggcctgctggaaaaacagcaccaggtcgcagagcgcctgcaacgcctgagtaccgagcttgagcgcagcgccgcccttgcgccgctaagtgatgcgtggaccgcctaccgcgaccgcctgcagcagctgatgctgatcggtaaccgcctgaacaaaggccaggccgaactgccgcaactggagcaacgtgcaagcagcgccgctgaacagttcacccagcaacgcgaagccctggacttgctgtatcaggaggccggtgccgagcctcacgccgtggccgagcagatccaattgctggccagcctgctgcaagacaatcgcaaacagcagcgagccttcgaagacctgacgcgcctgtgggacaaccagcaacagctggaccagcaagccaccagcctgacgcaaaagctcaccacggcccaacagcaacgcgaacagttgaaccagaccggcctgcacaccaaggccgagctgaccgtcgcggaacagacgctgaacgtgaccaaacagctgctggaacgccaacgcctggcccgcagtgccagcgtcgaggaattgcgcgagcagttgcaggacgaccagccctgcccggtgtgcggcagtcacgaacacccgtaccaccagcccgaagccctgctgcaaagccttggtcgtcatgacgaaaacgaggaagccaccgcgcagaacgcggtggacaccctcaaggagaaactcaccgagttgcgtggcgaagtgggcggtttgatcgcccagcagaaggaatacctgcaacaacaggaacacctggcgacgcaacagcaagcgctgaaaccgagcctggatgcacacccgctggccgcatcgttgttcaaccaagaggccgccaaacgcagcgcctggcttgagcagcaactgagccaactgacccaaagcatcagccaggacgaacagcgccaaggcgctctgctcaacctgcaacaaaatgccgggcgcctgcagcagcaactgcaagccgcccaggaggcaagccagcaggcccgccaattactggtcgaccagcaacgcgagttggccagtgaccgcgaacgccttgagcaggaactgagtgccttcgccaacctgctgcccccagacaccctggcaggtctgcgcgccgagccggccgccaccttcatgcagctggaccagcaggtcagccagcgcctggaacagctgggccaccagcgcgacgaattggccgagcaacaggaacgtcaacaggcgatcgagaaggaacagacccaccagcagcatcgccagcaacaactcgacgccctgctccagcaagtcaccgagctggcgagccaacagcaaacggctcaggaaaaactcagcgcgttgctcggtgagcacaccagcgccgaacagtggcagcaacagctggatcacgccgtcacccagtcgcgccagagcgaaaccgacaccaaccaacaactgcaggacatccacaacgcgctgatccaactggccgccgacctcaaggctcagcaggaacgcgaacaggcattgcaggccgaacagcacagcctcgacacgcgcctgcacgactggcgcgccctgcacccggaactcgacgacgccggcctcgaccgtttgctggcctacgacgacgcccaggtcagccacttgcgccagcagttacagcacagtgaaaaagccgtcgaacaggccagggtcctgctgcaggaacgtgagcaacgccttgccgagcaccaggcccaacacaatggcaacctcgcagccaatgagctggacaccgccctggccacactcaaccagcaattggccgaggccgagaaacactgcgccgaactgcgcgcgcggcagtccgaagaccagcgtcgccaggacgccaaccaggcctttgccgagcagatcgccaaggcgtatgacgaatggcaacgctgggcgcgcctgaacgcactgatcggctcggccaccggcgacaccttccgcaagatcgcccaggcctacaacctcgatctgctggtgcaccacgccaacgtgcaactgcgccaactggtacgccgttaccgcctcaagcgcggcggcagcatgctcgggctgctggtgatggacacggaaatgggcgacgaactgcgctcggtgcactcgttgtccggcggcgaaaccttcctggtgtcgttggcgttggccttgggcctggcgtcgatggcctccagcacattgaagatcgagtcgctgtttatcgatgaaggcttcggcagcctggacccggaatcgctgcaactggcgatggacgcgctggacggtttgcaggcccagggccgtaaggtggcggtgatttcccacgtgcaggaaatgcacgaacgcatcccggtacagatccaggtcaagcgccagggcaatggtttgagcacggtggaggtgaagtgagcgaagcgctgctgtattcgttccggcgctgcccgtatgcgatgcgggcgcgcctggcgttgcgttattcaggtgtgcccgtgcagatcatcgaggtgagcctcaaggccaagccggccgagatgctggcgctgtcgcccaagggcacggtgccggtactgagcgttgacggacgggtgattgaagagagcctggagatcatgcaatgggccctggcccagcacgatccggatgattggctgctgcagggtgacccggcggtactggcactgattgccgagaacgaccagggcttcaagtatcacttggatcgatacaagtacgccgaccgctacccggaacacccgatggaacactatcgggccgagggcgcggtgtttttgcagaagctggaaggcttgctggcggaacgcgcgtacttgctggcagagcatccgagcctggcggacatggccctggcgccgtttgtgcggcagtttgcccatgtggatcgggagtggtttgccgggacgccatatcaacggttacaagcctggcttcagcgcgtccttacttcaccgctatttatcgccgtgatggcaaaaccctgaggccggcacaatcaaatgtgggagggggcttgcccccgatgacggtggatcagtcagctaatctgtagctgacccactgctatcgggggcaagccccctcccacatctgatctcagtgatctaccgcttagtgctgggtcttgtgatccagtgcggcgtagaaattggcgctctgttgcaggtatttctgggtgtaggcgctggtgctggattttttgccggtcacttccacgctggctgcggcaggcagggcaacagtggcagaaacagcggaagcggcgatgatggagaagaggttcagattcatggcggtaacccttgtgttcgtttggttgagtggccggggaaggccttggaaccaaacttacgcccgagggctgaaccttagaaatgctttgaaacagtagccgctattaacagaattaatagaaagggtcaggccccgcgcggcggggcctgtggcttattgacgcaccaggaacttgaggtcgctgggcgcatcaatcggcaatttctgcacggttttacccagcaggccggtttttgggtcgcgttcgactacgacgatttcgttgcttttctgattggcgatcagcaggaaccgaccgctggggtccaggctgaattcgcgcgggtggtcaccgtccaccgagcgacgttgcaactccttgaggtgcgcggtggccgggtcgatgctgaacaccagcaactggttggccgtgccacggttgctcacgtagaggaatttgccgtcactggaggcatgcaacgcggcaccggccttgtcggacaccggctgcccggcggcgaagtccaccagttgggtctgggtcaactggccgtccttgtagtcgaacaccgccacctgcgcgctcatctcggtggtcaaccaggcgtgcttgccatcagcgctgaacaacaggtggcgcgggccgctgcctggcggcagttgcaccgaggccgggttggccggggtcaatggcagttcatggttggccttggggtcgtagcggtaggcaaacaccttgtccgcccccaggtcctgcacaaacacgtacttgccatccggcgacgacaccaccgaatgcacgtggttcgacgcctgccgctcagggttcacgcgactggccgggtgcccactcagttgcaccggaggcgacagcttgcccgtggcgtcgaccggcagcaccgccaggctgccgcccgggtcttccaccaccgaatagttggcgaccaataggtagcgcccatcggcggccacgctggaatgggtcggctcattgcccaggctctgcacctggttgaccagggtcagttggtgagtctgcggatcgatgctgtagctgcttacgcgcccgaccgggtctttctgcccgggaccgttctcgttgaccacaaacaggtgcttctggtccttggagatcgtcagccaggacgggttggccgctttggccgcgagcaccggtttaccgctgaattggccagtacggctgtcaaattgcaggcgatagatgccttcgctgctgccggcggtgtagctgcccaccaacagttcataggtgtcggccggcgcagcttgcaccgacatcgcgcccacgctgccggccatcagcagcggccagaatttacgcatcatcatccgcttcatcctcgtcgttattgttgccggtgaaggcgcgcatgcagatcaggcggtgctcgcccgaatcaccggtaagggtccagctttgcaaggtgtcatcgaacgtcgcggcgtttacctgttccaggctgaagcgccagcgtttttctgcacggccgtccatggcggtgatcagcaatttttctttatcgagttggaaatcgaaggcatgcagcccatcgatttcaagcatgtcgctggtttcaaggacggcaggcaaattctcagtcatcacagtctttcatcaggttcaaagcgctaatcataggccagtttgctgccggggcctaaaaccatagcgggctaccgcatgctggcaacgccgggcattaccttgcaaggacgcattcttatccgacgtaaaggaattcccatgcccgcacagcccaataccccagcggcaaaccccacacgacaagcggttgaagcgcagtttctcgggcgcccgacgttgcgcaccgtcaccgcgcaaatgctgggcacccacctggtggaaaagtacccgcccctgacgctgcccgtcaccgatcttcggctggccgtaccccgcgaaggcggtggccgagtcttgctgcctttgctggacgtcgcgctgaaccatatcgccgacggcagttttcccgaattgacggcacgccagaacctggattgctacctgagcgatgcaaccggcactcggctcagctatcaggtcaacggagatcgtcgcgacttcgacctgcgggtcatcgaggccatccttcgggagctacctcacgtactgttcatcggttttcaagaagcactggccgcgtattggggacaagacagtgacgcagggggcagccgctggaagtggctggccgatgtgctgcagggcgtgttgctcgacgtcgccacgcgccagaccagcgtcacggcgcaacaccttgaaattctcaacgccttgaaccgctatccagaccgggcaacccgtgcgctcggccccgcccccgcgaacgaggtccacgcctacaccctggaaacgcatttgcagcgctcgggcaagcggctcaccttccaggccaccgagatcctggtggttcgcgcagagcaggtgttgttgtatcgcttatccggtgaggttgagccctaccccgacctggacaccttcggccaggcatggggcaaacacgtgcaacagcgtttcactgccgaccagatcacctggcagcagtatgagccggacgggaatatttttgaggtacaggccgcgcttatccttaaccagcaactggacgatctcgccgccctccaactcccggcccaaacgacggtacaagcgctggaagagctgtttgcggtgaccaccgatcccgcgcagtggctggcccaatccagcgccacgccgctggcaaccctggcatccatccaggcagccctgccagccactctgcaagacgccagcgcggccaaccggatggcctaccgccaaaacctgctggaacacgccaacatcaagcgccaggtcctcggcgactcagacttcgatagcctggaaaccctgcgcggttatgccaccgcgcatttgaaccaacagttgtgcatggaccgcgccgttgcccacggctggcagcgtgcctgcacccttgaggcgctgtctgccggctaccaggccgacgatctggaactgacctttcatgtgccggtgggcaccctcgaagggggttacattgaaccggtcgtcatgagcctggttgacctggcgctgaagaacctgtccggccgccccaagggccgcatgaccgtgcgccaccgcacgggccgcgagatcgaaacgtggttgacgcccgactacctgcttaaactggtccagcgtgttgatatcggcaaaaactatcccgcctacctgcgccgagagctgatgggggatacccaggccgcgcgtaaacgccaacagctgttcgagcaactacggcccattcatttaaagacccacgcgctggagtgcttgatcaatggccaggcgggcctgactcaacgcggctttcactgtgtcaatgcactggtaaaccctaacccgctggaacgtcgggttggtgacgacgaaattgtgatccgcccgctggcctttgtacgtaaaccaggcgccacggccgatgtcgtgcgcaacatgttcatcattgaaccgcgcaatacacaatcaggcccgcacttgctgtatcgcccggcctatcccgatgcattgttggagtacgccaaccgcgaccaactgctggccgccatcgcgcaaccgggtaccctgcaggacagtgtcctgacctggatgactgacaacgccagaggcatctacagccacggtggcttcacccagcctcactctgtacgcgtgggtatcggttcggagttcgatagcctgcccagcgtgcccaagcccgcagagctgacgcgcgccgacgacgaatgcaacgacgaactgcttcaggcgctcaacagtggcagcctcatggaatacctgttcggcagtgaaacccgacaactgttggatcaggctgaacaagcgtccacatccaacagcgaaagccgctgggcactgatcctggaaggcctgcaactggggttcaacacactactgctggtcgtgcgtggtcccttggcggcaatcggctggctgatgcaggccacacaaagcctggtgaaagacctgccggcactggaaagtgacgatccgaccgccagggagctggcgtgggttgatctgctgctcaatgtcggcatgctgctgttgcatcacggatcgctcagcgcaccccgcgaaacgcctttgcgcgctgaacgcgccacgactcccgcgccgttccaacgacgctggcctggccaatcaatcggtcgatcggctgtggttgaacggggggctgtcgggctgccttccgaaccgcccggtggtggccgcaccttgttggactttgaccgctcattggcgggcgacggcgcatcggccaggcttttgcagaagctgctggccgtcaacgtgccctggccaacccccattcccgagccggtttcccttgggatgtatcgcggcttgtactcgatcaaccgccaatggcatgcctcgctgggcggcctgctattcagggtcagcatcgtgccgggttttggcgaggtcttcattattcatcctctgaagccggaacacccgggcatccagctgaaaaccgacggccgcggccattggacgctggaccgggggctcaagctgctggggggtggacgcaagcgagtgcaagagctgcgcaatgaaaagcagcttgagaatgaaaggttgcaggcgcgcacgctccaactcgttcaggaagcgcagctcctcacggcgccgatcgatcaagcaggcgcccagttgccacccgccctcaaaagcctggagaaacaactcaagaccctgcaaatcattcaggatctgctgcttaaagcttccgatacacaacgcccgagcctggaagtacgccaacagactgaagtccaggaatacaagcgcctgcgcaatcagttcgaaacgctgctgcaaaacgtcgaaacccaactttcccaagccttgcccgtgcgcttcgagctagccaccttgacccgtcaactagaggccgccgcgattgctgacctgcccctgatcaatccatcaaccatcctgaaagaggtctggaatcaacagttgtttctgcacaagatgcaattggaagcgttgggattccataccgcgaccgaagcgggcgaacccttggaggcgtggaacaaacgcatgcagccacgaatagtggcgggagacttggccctcgtcgacgaaaacctgcggatggtcacgggttatatcgattacctcgaacacatggccgtgcattccgccacgatggaagccacccttgagtaccttgggcaagggtcgggggccgcgcgggcagtgcgtcaagaactgctggcaagcattccagtggttgaattgtttttctccgacaacctgaaactcagtgctttggaactgctgaccggcctgagccagctacgcttcaagatgcattcacaactttctgcgttgcagtggtattacaaggcccgttatcaagtgtccgggctggacataagcctgaaatcccacctcgaggtacgtagcagctccgagtacccactggacgagcaacgcaatgtctacgagaccgtcctcgacaaataccagcatgccgaattcgccctccaagccctcaagagcctcaaatccgacgctttaggcccggaagccgagcgtgtgctcaaaggccttgaatacgccaaggcgttggcgcaaaacgaactggaatcggtggttagagagcaggaagacctcaaggtcgaactgccgttatccaaaaccctgcgcgccaagcctgcggcaaagcgcgtgttcaagacccgtaaaaaggaatacctgatcggcgaactcaagcccgccgacgcgcaaaatgcccaggagcacatcaccatctccgacacattgctgggtaaaaccctggcttcgtataaccagcagacggatggctgggtctccatcgacgaggaagccagccctgtgccggccccacaggctcgctcactcgcggcgctcaaaagtgaagcccaggccttgattgaacagcgccaggacctggaacaactggtcgcggcggaccaggcgaagctggactcccccctcacccgccaggacgccaaccccggcgaatgggataagttgctcaacacccaagccaacaaactgaccgagctcgccaacgaaataaaacgcgaccatttcaacgcgcctaccgcccagaatctgatcgatgaatgcctggcacaggccaaggacatcaatcgctgggcacaacgtatctgcagcgaagcctacaaacgccagtggccgacaatggaaagcgtcgcttacctctgggaccaccagcagatcgatatcaacctcaccagccaggccgatccgcaacgcccgaccctcagtggcgacttcttcaccgaatacgcggtgtacgacaaggcgcaaaagccaccggtggtgctgtggtacgcgcacttccactatgctgccgctgacgctccacccgcgaattacacccgggcgcatctgaagttgccggagcaacgcaaactcacccagaaggatttgctcaaggcccatgtgcaggattatctgagccgtgtgaaggaccccgacaacgcaccggtgaccaaaattgtctatgtgctgatcaccccgccactggacaacctgttcctgaagatagcgcccaagcccaacgttcagtaaaccactggatgagaacctgttcctgaaacggtaacccgcaaaaaagccgcacactgtgcggctttttcaaaacgcgacgactcagtgcgcaaacaacgagttgcccttctgccccgccaacttctccggcttgatcaggaaccgcgccagcgccggcagcagccacaacgcaccgaacatgttccacaacagcatgaaggtcagcatcaggcccatgtcggcctggaacttgatggccgagaagatccaggtgcacacgccgatcgccagacacaggccggtgaacagcacggctttaccggtggacttgagggtctggtaataggcttcttgcaacggcaaaccggcacgcaggaagctttccaggcggctgtagatgtagatgccgtagtccacgccaatccccacgccaagggccaccaccggcaaggtcgcgaccttgacgccgatacccatgaacgccatcagcgcgttgcccagcaccgaggtcagcaccagcggcagcacgatgcacagcgtcgcggcccaggagcggaaggtgatcatgcacatggtcgccacgcacaggtacaccaggatcaggatggtcagttccgactccttgatcacttcgttggtggccgcttcgatcccggcgttaccggcggcgaggatgaattccaggccgtccctgttgttctccttggcaaagtcctgcactgcatgcaccgcacggtcgagggtttcggccttgtggtcattgaggaacaccagcaccggcgccagcgagcaattgttgttgtacaggccatcggcacgggcgatggagttgttcagcacatccgggttgcgcgacagggtttcccatttcaggttgccttcgttcatgcccttgatcatctgcttggacacggtcaccagcgagatcgccgactgcacaccttcggtgttctgcatcttccacatcaactggtcgatgggcgccatggcttcatagcgcgagcagccttcggccttggtcttgaccatcaccaccagcacgtcggaactggtggagtagttgctgatgatgaagttgttgtccttgttgtagcgcgagtccgggcgcagctccggcgcaccctggtcaaggtcgccgatcttcaggttctggctgtaccagaggccgccaccaaaggcgacaagcgccagggcgatggagatcggcgcgactttcgggttggcaaaattcgacagcaggcgccagaacgaatgttcgcgattcgcgtctttcttgctcttggcgatggcacgcttgctgatgccgacataggagatggccaccggcagcaggatcaggttggtgaacacgatcaccgccacgccgatggacgcgccaatcgccagttcgcggatcacaccgatgtcgatgatcaacagcgtgatgaagcccacggcgtcggccaggatggcgatcatccccggcaggaacagttgccggaaggtgcgccgggcggcggtcagggcgttgtccgcctcgctggactgcagcgcgatgccgttgatcttctgcacgccgtgggagatcccgatggcgaagatcaggaacggcaccagcatcgaatacggatcaaggccgaaaccgaagaagtgcatcaaccccagctgccagatcaccgccaccagcgtagtgctcaacacggcgacggtgctgcgcaggcagttggtgaaccacagcagcaggatcagggtgataacgaacgcgatgccgaagaacatcaccaccatgaccaggccgtcgatcaggtcaccgaccttcttggcgaagccgacgatgtggatcttgacgttggggttctgggcttcgaacttatcgcggatcttgtcttccagttcgtgggagaacttgcggtagtccagggccagtaacttgccctggtcctgcgggtccgggtaggactccagcagcggaatgtcgacgatgctcgacttgaaatcgttggccaccaggcgccctacctggccggacttgagcacgttgttgcgcagttgatcgagactttccggcgagccgttgtagctctgcgggatcacttcaccgccggcaaagccttcttcggtcacttcggtccagcgtacgctggggctccacagcgacttgagccccgaacggtcgacgccagagatgtagaacacctcgtcgttgatctgccgcagggtctccatgtactccttggtaaaaatgtcaccgtccttggcctccaccgagatgcgcaccgtgttgcccaggttggccaggtcgttacggtgttccatcatcttttcgatgaaggggtgcttgagggggatcatcttctcgaagctggtggacgggcgaatcaaagtcgcctgccagaacaggaaaatactcaccagcaggcagatgacgatcactgctggccggttgttgaagatcaggcgctcaagaaaggttgctttatcgttgtgatgactgctcattctttccccgcccttattattgttttacgagttcggcgccgttgggcgcggcgacgcgaacgccaccctgccccgccagaatcaagttgccgttgcctgccgccgtgacggacgacagcgaaatccggtccggacggttgaacacgctgaaggtcagaccatcgtcatggctgaccaccacgctgccaccgttgcccaccacgacgatggagccgtcatccagcaaggtcgcgcccgacaaaccaaactccagcgctccccgcgccgcgttcaattcgaccggctcccaggtgctgccaaaatccgtggagcggtacaggttgccacgcaagccataggccagcagcgtctgcggctgggcggtgccgatcacgccgaacagcgagccctcgtaggggccttcgagcttttcccaggtctggccgtcgtcgctggagcggaacatgctgccctgctcgccgacgatgaacaggccggcatccttgatgtgcgcgatggcgttgaggtggtactggtcttcgttgtcaaggcggtcgctgacgtcattccaggtcttgccgccatcggtggtttcgatcaacgcaccgtaggcgcccacggccaggccgtggttcgcgtcgttgaaccacacatcgagtaaaggtgcttcgcgcttgaggtcctggtattgctgggtccaggtggcgccgccgtcggcgctggcgaggatctgcgcatcatggccgaccgcccagccttgcttgtcatcgacaaaaaacaccgccgtgagcaattgccgggtggggactttggcttgggtccaggtgctgccctggtcgtcggaatagaggatgtgcccgcgatcaccgaccgccaccaggcgcttgcccgcgtggaccacgtcgatcatcaggcccttggcggccttgggggattcaatcgcaaacaccggcgttgcggcggtatcgctggcggccagtaccggtgtggacaacgcaccaccgaccagcaacgagagcgctgtggccagcatcgcaaccctgcgtgcggcgcgtgggcggcagacaacccaacccattacaggctcactcatagacctttctcccatttattattgttatcgcttgccttccggggccttgaaacctgcaatctagagcgcctggaggaagcaggggccatcctatcgggctttcgaatcgtctgacaatcggcgctacgttatcttttgttaactgaaggcatttggccccatggtgaatgtagctgcattcgccggggtgatcgccagcgcgcaaatgaatttttattccatctattgaattttaggaatttttattccattaatagccttcctgaaaacaataatccaaaggaccacggcgatgcgtgaactcggaatcggcttgatcggcacaggcttcatgggccgcgcccatgcattggcattcaataacgcccgtgcggtattcgaactgccggtacccctcaagctggccgccctggctgatgccgacagcgaacgcgcccagcgctgcgccaccgcctggggatttgcccaggcccatggcgactggcaggcgctgatcaatgacccgagcgtcgatgtggtagccatcaccacccccaaccatttgcactaccccatggccatggccgcgattgctgcgggcaaagcggtgtactgcgaaaaacccctggccgtcagcctggaacaggcggacgccatgcgcctcgccgccagtgccgccggggtggtgacgcgggtcggctacaactaccagcacaacccgatgatcacgctggcgcggcagatgattgccagcggcgacctcggcgaaatcatcagtttccagggcgagttcagcgaggacttcatggccgacccgacctccccgtggtcatggcgctgtgaggtcgaacatgcggggggcgccctggcggacctgggcagtcatttgttgtcgatggcccgttatctggtgggggatgtgacgagcgtatgtgccgacacccagaccgtccacggccagcgccctgccatcaacggcagcaccgagctgaaatccatcgccgtggatgaccaggtgcatgccctgctgcgtttcgccaacggtgcacgtggcacggtcagcagcagttggctcaagcacggctacaagaaccacctgagtttcgagatcagcggcacgaaaggcaccctggccttcgatcaggaacgcttgaatgaattgcaggtatgccgtattggccaggacggcttccagcgtttgctcgccggccccgccctgccaggttacgcggcgttcagcccggcggcggggcatcagttggggtacaacgaactgaagacgctggaggtgcaggagttgatgctggcgctcgcaggccagggtgcggatggcaccgactttgaggccgcgtgggaagtggagcggttggcgacggcaattcgcgtggcggccaaagaagaacgctgggtacacgtcgaagaagtttaacagccccgaaccttgtggtgagcgagcttgcctcgcgcggggcaagcccgctcactacaaaaagcaaagtctagcgcaaggcccggcgcaggactttgccgacggtggtcttgggcagctcagtagtacggaactccacgtacttgggcaccttgtaccccgtcaggtactcccggcaatgcgccagaatctgctcctgcgtgaggttcgggtccttgcgcaccacgatgatcttcaccttctccccggtcacgccatcttccacgccaatcgccgccacttcacccacgcctgggtgcagcgccaccacatcctcgatttcattggggtacacgttgaaacccgaaaccaggatcatgtctttcttgcggtccaccaggcggatatagccgcgctcgtccatcacaccgatatcgccggtcgatagccacccctcggcatccagcacctcggcggtcgcctccgggcgtttccagtagccctgcatcacctgcggcccgcgcacttgcaactcgccctgctcgccgatatcagccagctcgccgtcttcgcgcatgaagcgcacccaggtcgacggcaagggcacgccgatgctgccggtgaactccatctcacgcatgcgcgcaatgttgatcgggctgatgctcaccaccggcgaacactcggtgaggccgtagccctcgatgatcggcagcccggtgacttccttccaacgcttggccaccgccgtgtgggtggccatgccgccggcgatcaccatgcgcaggtcggaaaagtcccgcgcacagaactccttgttctccagcaagccgttgaacaaggtgttgaccccggcaatgccgttgaaacgctccttgcgcaggatcatctgcacccgtttcacgtcccgtgggttggcgatcaggatgttgcgcccgcccaggcacatgaacatcaggcaattcaccgtcagggaaaagatgtggtacagcggcagcaaggtgacgttggtttcctgcttgtcctggtccagttggtcacccacccacgccttggcttgcaacaggttggcgatgatattgcggtggctgagcatcacgcccttggcgtcgccggtggtgccgccggtgtattgcaaaaaggccaggtcgtccagatgcatccccactgggaaatggttgagtgcccgcccctgtttcagcacctggttgaagcgcaccgaaccgcgcaggttgaacgccggcacctgcttttgcacacggcgcaggatgaagttcatcgccgcgcccttgaaggtgccgagcaggtcaccgatggcggcgatcaccacgcgcttgacgctgctgccggtgatgactttttccagggtgtgggcgaagttctcgaagatcaccacggtttccgcgccgctgtccttgagcagatgcttgagctcatgggcggtgtacagcgggttgacgttgaccaccacggcgccggccaggatcgtgcccagcaggcagatcgggtactgcaagcagttgggcatcatcagcgccacgcgatcgccctgcttgacgccctgtgcctgcagccaggccgcaaaggcgtacccttgcacctgccagtcggcataggtcatttcggtgccgatactgacgtaggccacccgctcgcgaaacttctccaggtgctccaggaatacctcgcgcaacgacggatagtcctcgatacccgcatcgatatccgccgggacgccaggcaggtaagcgttcaaccagatccgttcggtgtgttccaggcttacagcgttcatggcagtctccttgttgttgtttttgatagagctacttttcgacgatggcggtaatgcccagcccgcccgccgcgcagatcgaaatcagcccgcgcccgccaccgttctcatggatgatcttagccagcgccgccaattgccggccaccggtggccgcgaacgggtggccgcaaccgagtgagccaccgttgacgttcattttggcgcggtcgatggcccccagcggtgcctccaggcctaggcgctcgcggcagtaatcggcgtcttcccaggccttgagcgtgcacagcacctgggcggcgaaggcttcgtggatctcgaagaaatcaaagtcattgaagctcaagccttcgcgctggagcatgcgcggcactgcgtaggccggggccatcaacaggccttcgctgccgtcgacgaagttcaccgcggcggtctcgccggtacgcaggtaggccagcaccggccagccgtgttcggcggcccacgcctcgctggccaacaacaccaccgaggcgccatcggtcagtggtgtggaattgcccgccgtgagcgtgccgtcctggcggtcgtaggccggggccagcccggcgagtttctccaggctggcgtcggcgcgcaggttgttgtccttcgccagtccgcgatgggggctgatcaggtcgtcgaagaagccgcgcttgtaggccgcttccaggcgttggtggctggtgagggtcaattcatcctgggccaggcgcttgatctgccagcgcttggccattgcttcgcagtgctcgcccatggacaagccggtgcgtggctcgccattgcgcggcagcaacggcttgaaaaacatcgatgggcgaaccttgagcaacgtcttcaacttggcgcccatgcccttggcgcggttggcggcgagcaaggtgtggcgcagggattcgttgatgccgatgggtgcgtcggaggtggtgtcggaaccgccggcaatgcccacctcgatctggcccagggcgatcttgttcgccaccagcaaggccgcttccaggccggtgccgcaggcttgctgcacgtcgtaggcgggcgtgtccggcgacaaggtggtggagagcagcgactcgcgcgccaggttgaaatcccgcgagtgtttgatcactgccccggcggcaaactcaccgaggcgctggccgtgcagattgtaacggtcgaccaggccctgcaaggcagccaccagcaggtcctggttgctgtcgtgggcgtacaccgtgttggagcgggcaaacgggatgcggttgccgccgataatcgccacgcggcgggtcggcggcgggttgaagctgtagtcactcatcgaacgctctcattccaaatgaataggccgcgcatatggggtttgtcgccggcgaagttgcgcacttcgaattcacggcgcgggccggtcacggggtggttccacagcgctacctggccgggcaggaagatcggcagcttgaagtcgcaatgggcctcggcctggtccagcccgccgggtggttgctgggcggcgagcgctcggcccagggtccacatgccatgggcgatggcacggcgaaagccaaagagtttcgcgccgatcacggaggtgtgaatcgggttgaaatcccccgacaccttggcaaaacgccggcccaggtcggcgggtaacacccagcgctgggtgcacaacaaaccctcctcctgcaatggcaacacgtcgtcccatggctggccgaccgggtccttgacgtcccggcgcaggtacaggctgtcgctctcccagaccagagtgtcggcaccgtaggcacgggtggcgatgctcagcgcctggcctttgggatgggcgacccaacgctcggcatacacctccaggcgcaaggcctggcccgggtgcaggcgctggtgctggcgaatgcgattggccaggtgcaccatgccgctggccgggtacgggaagcttgggcgcgtcagcagcatcaggtgcagcgggaacgccagcacatggggataggacaacggcacgccctgctcacggcgaaacccacaggcacggccataggcctcaatgccggcgcccgacaactcggctgccgcacgcaccagacgctctttgggcagcagcggcgcaccgtcgagcgtgggtttgcgcaaggcgcgcacgccatccagcagcaagcgcgtgcgcgatggcggcgggtcgataatctgcgtcacgtagtccatggctcaggcccccagcaggctttgcccgcacacgcgtacaacctggccgttgaccccgccggacgccgggtgtgccagccaggcgatggtctcggccacgtcaatcggctgcccgccctgggacatcgagttcatgcgccgccccgcttcgcggatcatcagcgggattttcgcggtcatctgggtctcgataaacccgggcgccaccgcattcacggtgacctgctgcgccgctgcatggggtgccagcccttgcaccaggccaatcacaccggccttggaggtggcgtaattgctctggccgaggttgccggcgatgccggagatcgacgacacgcacacgatgcgcccaccgggattgagcccctggttgccgagcaacgcctgactgagttgcaacggtgcttcgaggttgaccgccagcacgctgcgccacgctgcttcgggcattttcgcgatggttttgtcacgggtgatcccggcgttgtgcaccaccacatcaaacgcgccgtattgactggtgtgggcctgcaacaacgcggcggcatccggggcggtgatgtccagcggcaacgcggacccgccaacgctggtagcggcttgctgcaaggcttcttgcgcctggggcacgtccacgcacaccacatgcgcaccgtctcgggcaagcacctgggcaatcgccaggccaatgccacgggaggcaccggtgaccagggcgcggcggccggcgaagggtttgtcccagttgacggtgacgtggccgtctaccggttgttccaggcgcaccacttgcccggacacataggccgagcggcgcgacaggaagaaacgcaagctgctgtccagtgcttcttcggcacccggcgccacgtagatcaattgcacggtgatcgcccggcgcagctctttggccaacgagcgcaccagcccttcaagggcgcgctgggcgatggcctggggcaagtcctggcaatgttccggcgcagtgccgagcaccaccacacggccatggtggccgatgcgtttggcgttggcgtggaagaattcatacagctcgtccagctgttgcagatcggccacggcgctggcgtcaaacactgcgccctgcaccttgaccgtggacggcgccttgggcgtggccggggtggcgatcactgtgtcggtggccgcgaacacacgctgcacttcagcggccagacgccctgccccggcaacgatcaccggattgaccaggccatgctggccgctgcgatggcgttgcagcggcagcggttgcggtaaacccacggcctgggccaggcgacggccccagggggaattgacgaacgaaaggtagctgtcactcatagatagatccactcaccacacatacttgccgtgtaaacccggtctgtgtgggagggggcttgcccccgatagcactctatcagtcaacgattcattggctgaaccaccgctatcgggggcaagccccctcccacattgattgggttttttcctaattgactgaggcgttttcactttggctggcgcgacgtttcgtggtcggctccagcgcctgtttgcgctgttgcaatgcttccaacaagccgaagtcctgcggaaagtcgtccacctggataccgtgatcggcgtattccacataacgcccgagcaaggtgtcttcgtcgtcgctgatcaggtccagtgcccgtgccttgacgcgccaggtcgtgaacgccgtggcggagatcggcattggctcgatcaggccctgcttgacggcggacttgagtcgggcctcgatcagctccacttgcggcaacagacggaaacccagttcgccataggccagcttgtcgatttccggacgtgggatgtaggaattggccagcagacggtcgcgggtttcccccggcgtctgcaccacatcggccacctgggccagcaggcggtcggacggcttgcgcaatgggataccgaaggggaacgtcaatgcctttagcacggatgcagcggctttcgacgggtaattgtcgagcacttcggccaacgcttcatgggcacgcagcaacgcatcctgggccgcccagtgcaccagcggcaaatccgcctggggccggccgtcatcctcaaagcgcttgagcacgcaggacaggatgtacagctgcgacagaatatcccccaggcgcccggtgatactttccttgcgcttgagggcaccgcccagcacgcccatggagatatccgagaccaacgccagcaccaccgacagacgattggcctggcggtagtaggacgccagcgcggggtcggtcttggccggcgcagaaatcagccgaccgcctgtcagggaatgcaccactgcgcgtacggtgttggccaatacaaagctcacatggccgaacatggcactgtcgaatgcctccagcgccttgcgccggtccgggttgcgcgccgcttccatctcgcggaacacatagggatggcaacggatcaggccctggccaaagataatcaggcagcgcgtcatgatgttcgcgccttccaccgtaatggcgatggggctttgctgataggcgcgggccaggaagttgttcggccccatgcagatgcctttgccggcgacgatgtccatgccgtcattgacgatgatccgcgcccgttcggtaacgtggtacttggcaatggccgagatcaccgaaggtttctctcccgcatccagggacgctaccgacaccttgcgcaccgcatcgcaggcatacaggtgcccggccatccgcgccaggggcgcttgcacgccttcgaacttgccgatgggcaggccgaattgtttacgcatcgccgcatacgcggtcgtgccgcgcaccgcgaccttgcccaggccgacgttggccgatggcagcgaaatcgcccgtccggctgccaggcattccatcaacatgcgccagccgttgccgacttgttcgcgcccgccgatcacccattccaaggggatgaacacgtccttgccggtggtaggaccgttctggaacacggcgttgagtggccaatgccggcggccgctgttgacgcctgggtgagacgttggaatcagtgcgcaggtgatgccaagggaacccggagcgccgagcaggccgtccggatcttctgcgcgaaacgccaggccgagcaccgtggcgatcgggccgagggtgatgtagcgcttgtcccaggtcacccggaagccgagcacttcctcgccttcatgcatccctttgcaaacgatgcccaggtcgggaatcgccccggcatcggagccggcatacgggctggtcagggcaaagcacgggatgtcttccccccgcgccaggcgcggcaggtagtaattgcgctgggcatcggtgccatagtgcagcagcagttcggccgggcccaaggagttgggcaccatcaccgaaatcgccgccgccgagcagcgcgtcgacagcttcatcaccacctgcgaatgcgcatagtgggagaagcctttgccaccgtactgcttgggaatgatcatgccgaggaacccggcgtccttggtgtattgccagccttcaggagacatgtcctgccacacctgagtggtttcccaatcgttggcgatgtcgcacagggtctccacttcgttgtcgaggaaggcctgctcttcggcgctcaggctggcgggcgcggcttgcagcaggcgctgccaatcgggcttgccgctgaacagctcggcgtcccaccacacggtgccggactcgatcgcggcgcgctcggtgtcggacatagcgggcatgattgtacgaaacaaacccagagccttgctggtgagcaaggtgcggcgcaggggtttgatggtcatcagcactgcgggcaacaccaccagcagcgccgcaacgccaatgccgaaaccggccacagcgttgaacaggtaaccggccgccagccagatcaagccagcgcccagccagtgaatggcagcggcttgtcgatacgccagggcaatcgcagcggcgacacccaccaataaccagataaacatggggatacctctactcgattcagggtatggcaaaagcgcttgcaggtcgcactgacctcaggcgtaaggccacactacaaactcggagaaaaacattcaatttttgttttgaaatttttatttaatgcttggacgaataaacaacggctgaacaggtcagccttacagagtcgcgattgagttgaagcggtacgggtcgcctgcgcgacccatcaacgccaggccagactcaaacggcacgggagatgcgctccctgccgctcgtctatgggccctgcgctcacaatgaatcagaacgcgtaagtcgccgaaaggctgacaacttcacccttcgcgtcggctttgccatcgagagtggccccacccaaacgatcctggttgtgggtcctcagcttggctttctcgacgaattgccgcgagtaagccccatcgatactcaaaccaggaatagcacggatgttgtagccaaacccgagggaagcaaatatacgatcaccgtccggaatacgtgggtcacgtgtggagtttcgtgttggggtctggtcggtggctacaccggcacggaaagtgaagtcgtcggtgaatttatagtcaccgcccagcgaaaccatccaagcgtttttataattgtagggaattgacacaatttgcgcgccgtcagacttcaatgtcagtgccttgaacgacgaccattgagtccaggtaacgctggcgcccaacgtcagacggtcattgaactgatgcacccaatcgacagaggcatttgccggcacatccagttgcgcggaggcattggcgccattggagttgaggttgagccccggatacgcgagtgcaggcaggccaccatcgatcagcgctttgttcgcgtcgtcggcgtaaatgctgtacttaccctctagcttgttttttatcttggcgtggtagttcaaacccagggtgtcgaattcggttggcttccagaccacaccggcaaaccagccaacggaggtgttatccaccttgacccgcatcaaagaagaacccacaccggaagggaacggaattccgatggcaggtgacaacgccgctgctgcatataagtcgatgttctggctgacaaaccctttggtgtgctgaacaattgcaccggcgcccaaagagaactggtcattaaccttgaacgataacgaacccgtgactccgacggtttcaatacgcgtatcgaccgcaaaatcccggccgatccagtcctggtcccaggttgtacgtgcacccatcggcactacctggcttaaaccgaaagcaaaacggtcgttgataggcatcaccatgaagccggtgggcaaccacgcggtaaagccgccttgtccaccatcaccggtgcgtggcgtggagcttaaatcagtggggtctacggcggctggcgcattgcctgcgtaatccttggccgtccccttgtatttgatattaatccgtgcgtaatcgacggtgaactgagaaacgttgtgatcgatgaaagccatggccgccgggttgttgtaagccgcagacgggtcattctggaacaacgatccccccccgaaggctctcccccagccaggagcaccgaaagtcggcgtggaaaacccgccagcctgcgcctgaccggttgcagtcatgaggctgcctagaatcgccagactcaataatgtgcgcgcctgttgttttttattgttcatgccctgttccttattatttttctcatgttcggcgttcaaacctgtcccacgtcagcgggcgccttttgcaaggcgcccgccttaacgtgtgatcatcacgtttacagccagaagcacgttatcaaggggtcacagtgaaggccgggcttggattgacagccagggttttgatgctgcaggcacccacagtttgtgcagccggaatactcagcgtattggtcgcgttgttccaagtgacggcgatgtttgcagtgccacagttcgaaacaatcttgaagctcacaccttccacaaccccagtgaagttgttggtgctacccgccacgggcacgatgtttttcagcgtccaaggcaagttctgcataaccggtacaccacacaacgcgttagagccgctgacgctcgcaccagtgatggcagcagtggtgccatcagccgctaccgtaccggtaaacgtgatgttgcaaggcacggcaattcccagcgaagcaggtgaagccaccgaaatcggaccgcttgcagtgaagccgccagtcggcgcgatagtggccgcgctggccattgaagcggcaccaacgcagagggcgaacgaagttgcacaaacgagggttttcaagcttttcattgtttttcctcacatgttaaggcgaagtcatttcgccaggggtaatggccatgatcgagaggtcacggtgaaactgcagaacttccctttccagccaaatctcaattcaattaccgctgcaacatccgacggttattcaacaactttgaagttcggcggcatcttgatcgacaccgtcttgatcttgcagtcttcgccaatcggcacattggcggcttccaacttgccggtggcgttatcccaagtgccatcggccgttgaaggtccgcactttccgcccaggccaaatgcatgcacatccacgctgatcttcgacatggaaccgctcttggtgtctttggcgactaacacccatggcaagttgatggcttccacgcggctgcacttgaggccgccgtcgaattcaactttgtcgacattcaccgaggagccatcggccgcaactttgccggccactttgatggtgcagtcggcgctgatcagcgcgcccttggagaagctgatggggccttgggcggtaaaggcgctgcccgccggttcgatgcgcgcagcctgggcctggtgatacgcgatcaggcccagcgcggccaatacgatgtgggtggtgaacttggcaggtgattgcatggtgtacgtccttccctttaattatttttgttcgggtcaaaccactgtgttgcaactgattttgtaaaccttgggcgaagttagcctgcgcggcacgcaggccccgagtacgccaacaaccggttagttgaacttaaaacggtttggcgctgttactgtacttctccaggtacttcaaccgttgtgagggctgaagattggtcagggagatatccccggcataatgattcagcacgcgatggtccatgcgccgccgccacaagtacggcacataggcccagacaatcatgctcgcgtagccatagggcagttgcggtgattcatcaaagtggcgcaacgactgataactacgggtcgggttggcatggtgatcagagtgccgttgaagttggaacagaaagatattggtaacaatacggttgctgttccatgaatgccgtggcgagcaacgttcataacgaccattgggcaacttctggcgtttaaggccgtagtgctccacatagttcacgacttccagcaacgagaagccgtagatgccctggataatcaggaacggaatcactgccgcgcccagccaggcgatcatcgcgccccacagcaccacgctgtacatccaggcgctgagcacaccgttctgccagtgccaggccggcaaaccgagtttgcgcaggcgttcgcgctccaggttccacgccgagcgtgcactgaaccacaccgagcgtggcaggaacgcccagaagctctcgcccaaccgcgaactggcggggtcttccggcgtcgcgacacgcacgtgatggccacggttgtgttcggtgtagaagtgcccgtagaaagtcggtgccagggtgaccttggccaggaacacttccagcgcgttgggcttgtgccccagctcatgcgccgtgttgatcgcgatgccggtggcggcgccggtcgacatggccatgcccaggtaagtgaaccagctcggttcgccatgcagttgcgtgcgtgcagtgatgtaactcgcagcgtgagacagccagctggacggctccaggttcgcggcagcctgcaacaggccgccctggatgatccagtcgataccgcccgcggcgagccagccggtgatcaccaccgacgagatcacaaacagcacgccggtgtagacgatccagcgatagtagctttgggattcgaggtggctgacggcggattcgggcgggttgctcacgtcttcaccgagcaagccatcgatcaacgggatcagaccgaagatcaccagtacaccgacccaccagagttgctggataccggtgctgatggccagtgcgccggagagcaacggggtggccaggggcatgatgcccagccaccacaggtgacgtttgccgtcggtccagatgcttggggctgccagggtctgattcatggcagcctccgtggcagggaggcaggaaacaggttcagggagcgctgaaggctccaggaaatcaaccatgcgataaaagacgtttttttcatttttattcgctcttaggcatttcaaaaatcatttcaaaataaacattgaaatatttttttaaagaaatagcgcggaatcgttaggtcgtcaactactttttcgaggccttttttgcgtgaccgtgcagtctctttttcagctgtttggtcaggtctctagggcaagcatttcggacagtcaaacccgcaacgagggccacgattatttgttcgccaaggcaaatggcggatgcaggatcgcggcggtctgtgctggccgcgcccgcttggccaactgctggactgcctcgaccacccgttcggtggcggtgatcggcagcatatgcccgcgcccttccactacttgcagcttcaggcccggcaccttgtcggccagggcctggccgtgcttgcgaaagtccaggaccttgtcccgtgcgccgtagatcaggctgatgggcagcgtcagttgcgggtagcgcttgaccatgtccggcaggtcgtcgttgaccagagcgatctcgctggaggctgcatagaagttgtcaggacgcatgcccagcagcccgccgccacgggtggcgaagtcgtccggggcactgtccggtgcgaacacgcccttgaccaccgagcggcgcgtcaacaggcccatgggaaccgtcaaggtgcgcgacacccagcgcctgagccaggcaggtcgcacagccagtgaccagaacaccagtggcaaggtcggttgagggtgcgtcaggggcgccaccagtatcagcccggacaccgcatggggatggtcgagggccagcgccagggaaatcgccccaccaagggaatgccccagcaccagcggtttatccaggcccagcgtattgataaacgccgccacctgccgtgcctgggctggcaagtccgcaggagtgcctttatgacgggtggaatagcccgaccctggtcggtcgaggctgatcacgcgaaaatgctcgcgcaactggccggacaaggcatacgtcaggttgcgactgctgcccatcagcccgtgaatcatcaccagcggcgggcctttgccttcctcgtaataatgaaagcgctcgccgtccacctccagaaagcgcccgttgatcggaacggcggcttcgatacgccgcgtcatccatgtactgaacccccacaaaacggcgctcgcgcctataaacacagccgcagcgacaacccattcaacagccatagctcggtcctctgcatccctgctgccggcgacctgaccggaattgatcaaggcctcggccatcgtccacaccctggacccgaactgcgtgcctgtccgtcggacaagtggcacatgagagacctgggactagcgtaggcgatattttcaggtagattatttaaaatcttttttaaaataagtaattcaatttttctttgcaatggtgttctatctaaaagacaaaacaagaaaggagcacatccgatgcccacgagggactgcttatgaatgcccagagtgattcaatcgacatcgccatcatcggctccggcttcgccggcctgtgcatggcgatcaagctcaaggaggccgggttcaccgacttctttattgccgaacaggccgacaccctcggcggcacctggcgggacaaccactacccgggctgcgcctgcgatgtgcagtcccatgtgtattcgttttcctttgcacccaacccggcctggacacggcagttcgcgccgcaggcggagatccgtgcgtacctggagcaatgcgccacgcgctttgggttggggccttacctgcgtttcggcatgggcttgcagcgcgcggtgttcgatgagcacctgcaacgctggcaattgaacttcagcgatggccgccaggtcagcgcgcgggtgctggtgtcaggcatgggcggcctgtcgcgcccggcgttaccggatattccgggtctggacagcttcaagggcaagcgcttccactcccagcagtgggaccacgactattccttgaaaggcaaacgcgtagcggtgatcggcaccggcgccagtgccattcagttcgtgccgcagatcgcgccgcaagtggcccatatggacctgtttcagcgcacgccaccgtggatcatgcccaagcccgaccgggcgattacgcctttggagcgctggctgttcaagcacctgcccttcactcagcgcctggtgcgcggtgctttttactgggcgctggaaggccgtgtagtgggctttgccctgcacccacggctgatgaaaatggtgcagaaaatcgccctgcgtcacctgcacaaacaagtggcgcgcccgtctctgcgcaagaccctgaccccggactacaccatcggctgcaagcgcgtactgatttccaacgactactaccccgccttgtcgcgcagcaatgtcgaggtggtcaccgatcacgtgctgcgcatcgaagccgacggtgtgatcaccgccgacggcatcaagcacccggccgattgcctgatcttcggcaccggtttccaggccaccgatcccctgccccgcgactgcatcatcgggcgtggcggtgtggacctgatggacacctggaaagacggcgcccatgcctacaagggcaccacggtgcctggctatcccaacctgttcctgatcgtcggccccaacaccggcctggggcataactcgatgatcctgatgatcgaagcccaggtgacctacatcctcgatgcgctccagcacatgcagcggcagcgcatcgctacggtggacgtcaaagcggccgtggaaagcgcctacaaccaacagctgcaagccaagctcaagcgcaccatctggaataccggtgggtgccagagctggtacctcgacccgcgcaccggcaagaacaccaccctgtggcctggctcgacctggcgcttcaagcaggtcacccgccagtttgcgctgaaggattacgtggccgacctgctgccggtgaacacgcccagccgccccgtgccggcaccccactccaccccggaaggcagtctgtcatgaagtcattcaatggccgcgtagcggcaattaccggcgccgcatccggcatgggccgcgccctggcattggccctggcgcgtgaaggttgccacctggcgctggcggataaaaacagccagggactggaacagaccctggcgctgatcaagacctcgaccctggccccggtgtcggtcactacccaggtgctggacgtgtccgatcgccaggccatggaggactgggccgcacgctgcgcggccgatcacggccaggtcaacctggtgttcaacaatgccggggtggccctgtcaagcacggtggagggcgtggactatgccgacctggaatggatcgtcggtatcaatttttggggcgtggtgcatggcaccaaagcattcctgccgcacctgaaagcctcgggcgacggccatgtgatcaacacgtccagcgtattcggcctgttcgcccagcccggcatgagcggctacaacgccaccaagtttgcggtgcgcggctttaccgaatccctgcgccaggaactggacctgcaacgctgcggcgtgtcagccacctgcgtgcaccccggtggcatccgcaccgacatctgccgcagcagccgtatcgacgcgaacatgacgggtttcctgatccacagcgaacagcaggcccgcgctgacttcgaaaagctgttcatcaccgatgccgaccaggccgccaaggtaatcctgcgtggcgtgcgcaacaacaagcgccgcgtgctcatcggccgcgacgcgtattgcctcgacctgctcgcccgttgcctgccggccgcctatcaggccctggtggtgttcgccagcaagcgcatggcgcccaagccgcgtacgccggtatttgaaaccaatgacgaaccccgtctctgaacaggagcacgcactatgttgccgatccgccgtgacatccatttcgccctgcccgccgagcgcatcaaggactggcatgaacagggcccgttcatcacgcatttcttcaatgccctgtcgctgctgtttccccagggcgagctgtttttcatggacagcgtgcgccactaccgccagcacatcgacgaccctgctcttaaaaaagagatccagggtttcatcggccaggaggccatgcacagccgtgaacacgtggcctacaacgacttgctgcaagccgccgggctgcctgcgcatacactcgaccggcgcctcaaattcatcctcgacctgcagaaaaagcacctgccaccgtccttcaacctggcggtcaccattgcccttgagcactacacggcgatgctggctgaaatcctgttgagcgacccttcacgcttcggcaattcactcaagggctatcagcagatgtggtattggcacgccctggaagaaaccgagcacaaggccgtggccttcgatgtgtggaaccgcgtgatcaaacccggccccaagcgctacctgttgcgcaccggcaccatgctcaccactacggtgttcttctggctggtggtgttcgactttcacctgcgcttgctgattgccgaccgcaagtcgggtgggcacctgaggggtttctggcgcatgttgaagtttttgtatgggcacaaaggtgttttcccacgaatgctggtgccgtggctgcactacttcaaacccggttttcacccctgggaccacgacaatcgggcgcgcctggccgggatcgatggcctggtcgaggagatcgagcaggcccagcgcgggtattaagcctgcgccaaggcggcgcgttcacgtacaaacccttgcaactgatcgcccggcagcgccttgctgaaataccagccctggataatcaattcggcgccggtattcaggaaggccaactgctcggcagtctcgacgccttccaccaccacgcccaggttcagcgcctcacagaagcgcagcatgccggtcatcacctgggcgcccttggggtcgtgctgggccaccacgaagctgcggtcgatcttgatgaagtccaccgggaactggtgcaggtaactcagggccgagaagccagtgccgaagtcgtcgatatacaccttggcaccgatagcctgcagcttctggatggtctggcgcgtgacctggatatcactgaccagcgcgtcttcggtgatctctaccgatacgtgcccatgggcctgggccaggatctccaccaggcgttcgccataggcggcgtcggtcagggtcgcgctggaaatattgatggtcatcggcagggcaaaaccgagtttctgccacttctggtactggcgaactgcctgggacgccacccacacatccacatccggcatcaaccgtgcctgggccagccattgcaggaattcccacggcgaatgcaccgtgccctgggcgtcgcgggcacgcatcagcgcttcacacccggtgcacaggccggtacgggtcgagacctgcggttggaattcgaggtagaactcatagtcgctgatctgctggatgcggctcagctccaaggcctggcgcgccagggtcttgtgggaggcgagtaccgggtccagctcgcgcaggcggcccttttcttcaaggccacggaaggtcatgtccagggacttgaggtacaccgtgcccccttcgctggcctggcgatggatcgcccgcacatacggcgcgtacaccagagtgcccaggcccagcagcgccacttgcagtgccaccgcagccaggtcgccgtgggtactcagataggcattgagcagcaccggcgcggtgaacggcacactgaccaccgccggcgacacccagcccatctgtaccaccgtcaatgccagcatggcattcaacgccgggacgatcagaaacggtatgaacaaacgcgggttgaggatgatcggcaagccgaacagcagcacctcactgacgttgaacagtgacagcggcagactcgccaccgccaacaggcgcatggactggctcttggagaacagcaggatggccagcaacaggcacaatgcaccgcccgagccaccgataaacgcaaagctgcccaacaggccactgttcaacacatatttgagcggctcacccgccgcctgggccgtgctgttcagcaccacggcctggtccagcacatcgaacagcggttgcatcgcgtacacaccgtgtatgccgaaaaaccacagcagcgaattcatcagcgtcacgaacagaccgctgccgtagggcgattccagcgcgtcgaggacctgggggccttgtaactgcgccacatacggaatctgcagcaacaaggacagcaccaccaccagtgccagggcggtgatagcgcctggcagcaccatattaatggtgccccgcaggttgtgccccaccaggtcttcgttgaccagacgggtccagcggtagcggtgcagccaggcaatggcaggaacattcaacagtggcgaggcaatggcgataaacagcacaaaggtggccgaggcccggggataatcgcgcagaataaatgttgccaccaccacatgggccaggcacaggaatgccacgggcaattgcggcaggcgatgctggatcgccagcatgtaaccgatggacgcggccaccagcaacgggatcacggaactgatctggttgtgcaggccggcgaggaacgccaccacctgggggtcaaagccaaggacgcgagcacattccgacagaatcagaaagcccgccgagaccagcaggcaaggcaggatccacaacaacccttcgcggatcgcccgcagcgattcagtgctggccaacgcggccaggcgttgggtgaagaaaagcttgaacagcgtttgcgccatgacccatccctctgcccatcgcccactgtccctgcagggcagggctggaagcaccggctaacgctacacgtcctggcccaatcagcgaaagccttttgccattcatctgggtgaattttccgtatcggataacaggccaatcgccgaatctgcttcaatgaagcctatccgcctccccctgacctgtgtttggagtaagcctttgtcacaacccggtgataaccaccagcgcgcgctggacaaattccttgaagaacaccccgaagtcgccgccgaactggataccctgaatccgctggctgcgcaggccaggggcgaaaccctggtccagtaccgcgccgaacgcttgcatgaagcctttgaagcgcaagctgaacgccagggcctgtttgcctgggagctaaccctcaaactgaccgccgactcctgcgaggcctttgaagcccagcgcctcgaagtgcacaaggaggtggcgcagatggctggcctgagctgggtcgagtactgccaactgcacgacctgccccgctaacgcactaccccaggaaccagagacggcgcctgccccccagcacttcgcgcaactcggcgaccgacaccgttcgttgttcaggatccatcgccagtgccgaacacacagcgggccagcaatgcctgggcagttgcctcggcctcggcagcggctgatgctgctgacgttcgccggggcgcctcccttcggccagttcatagagcacgctggcaaccccgtataaatccgcacgggctgacggaagcccgccggccatcagctccggtgccgcatacgcaggggtccaggcattcaggcgactgcggctcaagccgggcaatcctgcccttgcctgcgcttcagcatggcccaggccaaaatcgaacaagcgtaccccctgctcccccaccatgatgttcgccggtttcacatcgccatgcaggaccccttgtcgatgggtgtacgccagtgcatccagaagttgcacggcgatgggttgcaacgctggccacgccaacccttgcgggcattccgggagcaggcggtccagggtcaggccgggcatcacttccatggtgaagaatgccaactggtgcgctgtgtcgacctcgaaagaaaaggcccggaccacgtgttcatggcgcaggcttcgggtcagggcgaactcgctgtacagcaacacgtgggcgtcggtggacgcacagagcgtctctcccaacagcttcagcgccacgcgcgcgtccggttcgccaaacgcctcatgtagcagatcccgggcacgatagaccacccccatgccccctgaaccgagcattcgctccagctggtagcgccccgcaagcaggttcggcgggccgacagcggcgttcatggctgcaccaccaccgcagtgaggtcatcctgtgcgggcccacgtagcacgtcgctgaacaaccgctccaccacctgccctggcgtgccggcattcatcgcgcgccccagttcccggtggctgagcccttggtacaggccatcactgcacagcaagaacacatcgcctgggtggggacgcagttccagtatctccagactcagcggttttcccgcgccaatggcacgagtcaaggcgcgggcgtctggatgagcgcgggccagttccaggctcaaatgctgcttgtccatcagttgctgttgcagggagtggtccctggacagctgatacaaacgctgccctcgccagagataacatcggctgtcccctgcccagatgcacgccgcgcggtcacgctcaagcaacagcacaaccaccgtactgcccatgatgcctgaggggccatcggccgcctgcaactggctgtcgagcccgcgcaggcagcgttggacggcctcgacccgttggtcgaagctgccttgccctggcagcgccgccagactgctgattaccctttgactggccacattcccagcatgatgcccacccattccatcggcgaccgcccagcaaccgcgttgcgggcaatcgaggaacccatcctcgttacgcgcacgacgcttgccttgcgccgtacggccggcacttcgccaagggtgcgcgcggttcacaattgctccggcaggcgaaagccgcgccatgtagccatctggaacgggctggggctgcgttggctggtgagcaggtagttggcacgcaggccggccaggtcggccttgagtatctgtgcatccctgccgctggccggctcgttttgcatcaattcgaaaagccggaacaacgaccaggccccctggtctttttcaatgcccagcggtcgctccgtaccgcgctccagtaccaggctgctgcgcccattgtccgcatcaatcggccaatggaacgccatcggcacgatggggccgtgacggtattccaattgctgatcgcccacccgcagcgtcgcccggttgacggcctggtccaggctgtagggcgccagcgtgaacagaacggtccaatccccctggtctgcgctgaagaacccttggcgaatcacctgcgcccgggtcagttggtcgagcaacgagcgtgaaacaggcaggctgcggccctcaaggccccgcaaacgatagcggctcccctcgacactgacgaacggccgcaggtagctgtcatagaagtgctccatcaccccccgtggtttaaagaacgactggaaatcacccagggcaacatcgctgccggcatcggcattgaaggggtagcggtgccggatcgccttcacataaaaaccatacacctcactgtgataacgctggttcacatacccataggcgtcatccagcagatggcgccaggtttgctcggcaatcccgtccaaccagcccttgagcggctgcggcaggcgagcagcagcgtcacgcaggttgcccagcagcggctgctgtccatccatgcgttgcctggccatcttgaatgcggcctgctcgggcgaactgtcacggttcagtgtcgagacttgcaggtgcagctcatccagcaagcgcaaggcctgggtcagctcggcggtcgggttctgctcttcatccagcaataggtgcaaaggctcgaaacgacgcagtaaagcgcgccgggcagtatccggcagcgtttggcgcggcaaggctcgggtgagcaagccggacaccggcgcgcccaactcagcgacctgctggctcaccgcttcaagccgctcatgggtcggcagcaatcgcgtgtgttcacgcacctgccgcaacagcaacaccagcgccgactgggcggaagtgaagttcgcgagctgctgcgcatcgtgcctcaggtcgtcgctttccagtagcctgactcgacccagcgcatcactccagatgtcggcgtactcgctgaagtaacgctgttccagctccagcatcagcttgcgcaagtccacgacgctgaggtctgcggcctcgccaagcacccagttatcctgggcgatggcattgaccaactgtggcccctggctttcgaaaaactgcaggtatttacgcgtatagaaacccgggatgggcggctcaaccctggaaaacgcggggttttcagcgaggcgcaagggttccaggtgccgcgcttgctcgcgcagtgtccggtagaccacctctgccattggctcaccgcgcagcaccaggcgggcatgggcgaccaactcatcattcagcggggccaaaaaaccctgttcaacgagccgtgcaacatgttcgttcaggcgtttgtgtgtcgatgcatcctcgatgtacccaacagtccgcagccccgccacttgctcggccaaccaggccttatcacgtcgctcgggcagattgagcatcaggtaagcgcgcaggctgtcgagcaactgctcgcgatcacccaggctgtcacgtacctgttgttcgagccgtagggtcacgtagggcagcaattgctgatgcagggcttgttcgtaggcgctgctcaataacggccgactcatctcgccctgatacaagccgccccgctcaacccaaggtactttggccgccggtggaaacacccctgtggccgccaggcgactgtccaacagtgcgagcaacgccaggctggcgtccgcttcgggttggcctacggacttggggttgatcagctcccgcagttgcaccagccgctgatggttgaacgcgtaactgtgcgcccacagcgccccggcagcacccacaaccaatgaggcggccagcgccatcaacccgtggcgtcgacggatgcgctgccgctccggggcacgcaacccggcaagaccggcctcggcaaaaatcacccgattgaacaggccctgggcaaaatgggcacgcacatcatctgtcttcgcgcaggtcaggtagaacccgcgcaagccgttgattcgctggtagcgatgggcggcaaacgcactctcgataaacaggcagacaaactcgcccaggcgcgcaagatgctgaggaaaacccagcatgcggcctcggcgctcaaggttgcgttcctgatgcaagcgcgggatcagctcggccgccacgcgttgcaacaaggcgtcgaatgtttcgcgtacctcggcgacttccatgcctgccgcagccgccaccaggcgctcacccagccagtcttctgtggcgtcgccctgccgcgcatcaaagaactcggcaaacccggccaaccgatcaagctgggtcagcaccagatacaccggcacatccacctgcagtgactgctgaatgtcctgcaagcggttacgcacatggcgcgcgtgacgctccaggtcgtgttcgttgctgcgcaacagcgtaccgacggacagcgtcaccaccacgccatcgagcggccgtgccctgcgccatgacttgagcatgtccagcattgtcgaccatcctgctgcatcgacactttggtcgggttggctcaggtatcgacctgccatctcgaccaccaccgcatcgtctgcaaaataccagtcacagtacgaggtggcgcctggctgcatcgggtgcgtccggtcgagcgccgtcggcaacccggcagcggccagcaagtcggtcttgccgctgccctgctcgccgatcaacaggtaccagggcaattcctggcgcgaacgctcactgcgctcgccgtagcgctgcgcggttttcaacgtctgcagcgcttccttgaagcgcccccgcacctgcgccacttcgtcattgatcaacccctgctgctgaagatgttcacgctgcccaggctgatccaaacgcgcggagcgacgtgctcccaccaccaccatcgccaatccccataacagcagcattgcgctgatggtcaacaaccgggccgtcgaaccctgccagaaacggtagtcgtctaccgccagcaacggcccgacgaaccacaccagcagcgcgccggccagcaccagcaacaggctccatgcccaactctcgcgcagcaccctgcccacgcgtttgaagaatgcgttcattcattgctcccagcgttacaagggcgtccgagacggctctgccagcgaagattggaaagcatgcaacgtcgccctgcgctcctgccccagcatccaggcgaaccccgaatacaccaccagcagacacgccagcacgcagactgcggcccaggcagcagagacaatgcgtatccgtgcccgagcggtcccgtcggcgtctgctacaggggttaacggcggctgatcgccgcgcacatgcctgatctggcgatacaccgcgtcgtgtacggtttcgagctgcgccctcccccgctccatgacgcggtattggccttcgaaccccaaggacaggcacaggtacatcaactccagcagggccacatgcttgacggggtcgcgggacaagcgctcgagcagttggaaaaacttttcaccgccaaaggtttcgttatggaagcggctaagcaggctggtcttcgaccagtcgctacggccaccccacggcgtagtgaccacggcttcatcaatgacactgcacagcacgtaacgcgccgacatcacctggctgttctcggcgcccagatacaaggcataggcctcgaacgcattgatgcctgaggaaaactgctcattgagtgcctgctggctttcgcgaccggggttggccttgagctggaccacttgcagcaagagttcccaagccgcggtcaacagcacattggggccactcttgaagtgccgtgtaccttgcagctgggcgcaatagatcatgcggtcttccagttgctcgaagcgtggcggcgacggaaagtccgtaacggctgcgtgcgccgggccgagaccctcacggtcaagcaacacggttttttcgtcttgcgggtattcactgtccatagtcatgacgtcagttcctgatagcccagaagttgagttccagctcggcaaactcgccgctggcgtggaaggcgaaaccacctgattgctccagctgtgcaatgtcacgggggctgagttcgagcatgaaataggtcttgccggcgtggaacggaatctgccgcggcgctaccggcaacggcttgaccttgatcccggccaggtgcaggttgaccagttcgcggatgcgctccaccggtccgatcttgagatgggccggcagtcgatgacgcagctcctcggtatcgcactgggcagtggccgccaggatgaaggtggccgtaccgagtaacttgaggtcgctcaccgggcagaccagcaccccgtactgacggggttgcagcgtcaactcgaccgcctgctgttccaacaccagcgacagcaccgtacgaaggccttccatcaacccgcgaaagctcgcgccctgatcgccatgccggtattgcaccggaaattgcgcacgtttgttgtcgttggaaaacgtgcacagctcaccgaaaatcgacagcaactcccgatacaccacctccgggcgcacctgggtctggctcaggtagtgacgcaatctcaactccgcacgattgatcaactgcagcatcaaaaagtcgccgacctgtgcgctggcggaagcgccgtttccctggatgcgagctgcaatcgcatcgccacgggtcgccagcaggctggtgatttcgttgatgcaagacgccacataccccgagccctggaggtagataaacgtcggtacaaaatccgcatccagcctcacaccaccgtcctgggtcgaatccaccacccgggcaacctggagtttcacgtagaaagggtcaccgggcggctcgcccagcatcaggcgcaagtccgggcgcgcgcatttgatctggcaacgggagtcgaccccggcagcggagtcaccgatctctgcatcacaggcgacatagcgcgccaggacatcgctttgctccttcgagcgcacctcgatctgattgtcagtcaccagcggcagcgccaggtacacagcctgcctgcctggattggcaggcacctgcaacatcaggggttccagggtgccgctcagctcgaacaggctgccgtccggtaacactccgctggcctggttcaccacaatcttgcccaggttgaggtactgcacatcgacttccaggctcaggaaaccccaggcatcactgttcaacagccgggtatggttgagttgccgatggtagtagcggtcgctgtgctgcaagtgttggggcctcagcagcatgccctcttgccagataacgttgtggatctgcatctcagtcctccgtcctgtcaggttgagttgctgccatccggatacccgtctggtccagcacgatgtcggcacgggtcaactgtccgggagccaaaggcagcacccatcgccattgcacatggggcaagtcacgataggccgccagcacgccgacatagcgactgcgcggctcgacactcagcttgagcgccagccgttcgccggggcgcagttccagctcctcgccgctgacccaatccttgggcagtgcctgctcggcccggccgtagaggctgaagaaatcagcgttttcaaaggccaccggatgccgcagttccagcaattgcaccaccacgggcgaggggcggccgtgaaggtcggggttgacctcgtcgctggccgtcaatgtcaggtccagcttggtgagggtggaaaaaggtgaaaagttgctgcatcccgccagcaaccccagcactagcagcgttgataagacagcgacccgagaccggccaatcatcctgcgtaccccgcgtgaagcgtggagaccaggcgtacctgttcctcataggccttgcaaaagtcatgacgcagcatctgctcatccaagggttcctcgtcagtcagtcgcctgtaatggcgttggtaggcccgccaatgggcgccatcgctgaagaacctgggtgcattgccgtcacgttcaaagcgcagcagcaggcgcccaggcgcaaaggctgccactgcaccgcgtacggcagcccgacaggccacgaccagagccagttgatgaacctgcaagtctcggtacgcctggtcgaccgcttgctcggcagagaactgatcggactcaccgtcgccgagcaaaaaagccagggcggcatggctgtcggcgcagtttttcaacggattgcgggtattgagcagcggaaccgccaataagccgtggacctcgctgttgagttcatcacgggttcgcaggctttgctgcaacccttcgagggtttgcctgagcaggcccgccaccttgatcgccagggcttcgcgccccggcgtatcaagcgagtccacctgcatacccaatgcgtgggcgaactgcgcccagaatgcttgcgaggttgccggtggtggcgtgacaggaccaggtgatacaacgtccctggccggctcagcccattgcggcacgaacaggtgatcgtgctccaccgtgccctgacgtaacgcttcgaccgctgcctgcggcgtggtgtccaacgcgtccagctctgctgaggaattgccgagccgtgcctcgcgatccaatgcgtcgacaggatccagccccaggaacgcgtcgtctggaatcgtgtgttgccgagcaacaaccggccctgcctgcaacaccaggcgggcacggatatccagcagcccaagttggtacacatcgccgtcactgatgagccgtgcctgtcctttgcacaggcgctccatactgcccgacacaccgataccgttgctgctgatatccgtcaggaaatagcggccctctctaaaactgaccagggcgtggtgactggaaatcagacggttggcatccgggagcacccagtcacaactcgacttacgtccgatcacgccaccgacaccgtcaaacgtcttgcgctcaggtggctccccgcttgcggtgctacagagttcaaacatcaattgcatgacagcggccccctgttcagtgcccacgacgagtcgcatgggggtcacccaacggacggtagtcggcatcatcaaagacataattggcgttacagccactcaacaaactcagcgcaagcaccagggcttgccacggatgaaaaggcatcaggtatctcccatgaaaataagcggcccgcacgttccctgctcaaccctcctcgcgggcgtcccccacggggattttcaagcgcgccaggcggtaaagcagcgtgcgccgcgcaacgcccaactcacgggcggtacgggtgcgattgccacggttcttgtgcaggcaatcgatcaggaacacccgctctacccgctccaggcgttggcgcaacgtcgcatcgactgccccagtggcagccggcaccggcaaggacaggtgtgccggcaggatcacgccgtcgtcacagagcagcaccgcacgttccaccaggcatttgagttcgcggacattgccggggaaggcgtgacccgagagttgatcaagggctgcattcgaccattccaccggcacacgcccaagggcggcagaggcttgatgcgcgaattcccgcgccaacagcaacacatcgccgtcgcgctcacgcagaggcggcagttcgatgggaaactgtgcgagcctgtagtaaaggtcctcgcgaaagccgccttgggcgaccattgcggcgaggtcacgatgggttgcggcgatgatgcgtacatccaccttgtgggccgtactggcgcccaacggacgcacttcgccctcctgcaagacccgcagcaatttagcctgcagcgacagcggcatatcaccgatttcgtcgaggagcagcgtgccgccgtcagcgctgtcaaacagcccggtgtggttacgctcagccccagtgaaagcacctttgcgataaccgaacagctcactttccagcagcccttcgggaaacgccgcacagttttgcaccacaaaggctttgctcctgcgcggccccgcagaatggatcgcccgcgccacgacctccttgcctgtaccggtctcgccacgcagcaacacggtgtagggcgtatgcagcaccttgccgatcagacgatacgtctcgtccatagccgtactgctgccgatcaacccgtacgctgaacgcggcgccggcaggcaagcctggggttgggcaacacgtgccgtggcacactgacaccgcagtaaagcgcgctgcatcaaggcaaggctgcccagttggctcaaggcggcggtgtaggcctgcaggtttttccgatgctggctggcacacagcaacacacccttgatgcccttgcctcggtcaaacaacggcacacatgccaacgcttgccagggggtcgccatgaccggcaggaaaccgtactcgtacacgctgcctgagtgtgcttccaggctgagcgcggtttgctggttcagcacatagtgcagcacctgttcatgctggaaatccttggtacaggccggatcgccagggcaaggcatgccgtgcaaatgctgggcgatcagttcaagccggccagtggattcgttgcgccagtaccattggctgaggtcacactcgctcagttgcgccgctgcggcgacacacaaaccggggagagtggctgcgtcgtccgcgctgcccaggcggatgaacccgtcaagcagcgcatcggaacaggccgccgaacggggcagcagagtgagcagccgatcctccctcattggctgaactcacaggttggaacaccgttagccgccaaccgcgcatggacctgtgacacaggttcacctcgggccatggcttgcaatcgtcgatcgaccacctgcggcaacaaatgcagctcgatccattgatcgatataacgcgcaccactgtcatcgtgggcgcaccgctcggccatgtgctcaaccagctccggcgtgtagctgaatgccaggctgcgcagactcaagcgttgtcccaggcgttcgagcttgagccttgccaagtcatgcaggacgtcatccgtgaccgggtaatacggcacgacacgcatcctggccaataacgcggctttgaagtggtcccgcaattgcggcaggatcgcctcatgcagcgtttgcacgtcaggtcgccggccgcctgcgcacaattgcccgatgcgctcactgcccaggttggacgtcatcaggatcagcgtgttgcgaaagtcgatttcccggccttccccatcattggccaggcccttgtcgaaaatctggtagaacaggttcaacacttccgggtcggccttctcgacctcatcgagcaacaccaccgaatacgggcgttggcgcacggcttccgtcaacacgccgccctcgccaaaaccgacataaccgggcggtgcgccaatcaaccgggacagggaatgtttttcctggaactccgacatgttaagggtggtgacgaagcgctcaccgccatacagcaggtcgccaagggccagcgccgtctcagtcttacccacgccactggggccgaccagcaggaatacgccgaccggcgcgtcagccttgttgagcccggcagcaaccgcacgcagattgcggtccagggcctgcaccgcttgctcctggccgagaatgcgcaggcgcaacgcatcggcaaaacccagcacccggtcactgtgctcaagtgccagttgttcaaacgggatccccgtccaggcactgatgacctgagccaccaggcgggggcacacctgctgcgtggtttgctgctgttcaagccagcgttgctcatggtccaggcgctcaccgtccagcgtctccatacgctggtccaacgcgtgcaaggtctgttcgtccacgggaaaaccttcgtcccggtctctgctcaatgcctgaagctgccgcgcgccttccgcctgttctgcataaaggtgttgcaacgcctcaggcgcggtctcgcggcgagtgcgcaaacgagcgcaggcggtatccagtacatctaccgccttgtcgggcaactgacgcccggccaggtaacgggcgctcatctgcgccgccgcgaccaccgcatcgtcccgcacgtaaacgccatgactgcgctcatacaccgggactagtccgcgcaggatcgagatcgcttgctcgacgctgggctcaccgacccgcacaggctggaaacgtcgcgccaatgccgggtctttttcgaagtatttcttgtattccgtccaggtcgtcgcagcgatggtgcgcaactcgccgcgggccagcgccggcttgagcagattggcggcatcggacgcacccgcctgcccacccgctcccaccagcgtgtgcgcttcatcgataaacaggatcatcggtttcaccgcggcgttgacctcatcgatcacacccttcaggcgtcgctcgaactcgcccttgatactggcaccggcctggagcaggcccatatccaaggtcagtacccgcacctctttgagagactcgggcacctgtgcagtggccacccgcagcgcgaggccttcgacaacggctgtcttgcccactccggcttcgccgaccaggattgggttgttcttgcgtcgacgcatgagtatgtcgatcaactggccgatctcaacgtcacgacataacaccgggtcaatacgcccttcatgggcctggcgtgtcaggtcgtgagtgaagcgctccagcagtgattcgccctggggcgcggggtgtgtacgagacgcctgactcaacacgaacgcctgcacacgctgtggatccagccggctcagaaaaacctgataggcgctgcccgcgtgctgcagcggatgacgcaagagcgccagcaacagggcgccgtgatcgacctcaatgtgtcgcagttccaaatgagcaaccatcgaagcctgttgcagccattgcaccagtgcctgggcaaacaccggattgcgtgacgcactcgcctcccccttggtttgcagcgtggcttgcagttctgcggtttcaatatcggcatccttcagcgcccgcaccagcaggccatcgtgatgttccagcagggtcaacagcaggtcttccaccagcacttcccggccgccgcgcatgacgcagcgctcggcggaacgctccaggtctcggcgggcctggggggtcaatgcctggataagttgttgcaggtccacattcatcatcctgattcatccctaataagcgttgccaggcacaatgaccacaccgtcggcgcactcatgcgccagccaactggtccagccgaggcggcagacgttgtgttcaccgatgtgcaaaggccggatctcttccttggccatgaccaggcgcacgtcatagtccaaagggtcccgcgccgtcaggcgcaccaacgaacacagcagcggatagtccgcgccggtcggcaaaaaaccatggaatcggtcccaccccagcccctgcagatgcaccctgaacttgccgttgcgatcagccacccggctgcccagcacctggtcatggccaagggtgctgttcgcggcgccaagccgatttcgctgcgactcggcgatgaccacgctgcgcaggacccactgctcgacgaacaaacgacgatgcttgaagtagtaacgcagcaccgcctcgatcaaggccgccgaatgcacccgcaggctgagcaaccccaggtagggcaacagtcgcttgccattcagttgcgtggcgctgcggacctgcggcccccttaacccgatcaacgcaaacatctgctcggagaaggcatcaccggcgcttgcctggaaacacgcccgatagcgatatttgcgccagatcggcaacatcagccgttgcagacggtggtggaacacgtcaaggaagtcccgggttgcattgccacccaattcgtcggtgcacgcctgctcaccgtaaaacgccggcaatggcgagcccgcaccacacaggcccagcacgttaagacgcaaacgcgcacgcaactggccgtgctcgataaaaaacaccacccggtcgatatcgtgaccaggaaaacccaggcccgggttggcctggaactccagcaagtcgtacagcgtgtcgtcatccagcaacggatgggcatcgcgcagacgctggatgacccgcaggaccgcctgaaacagcgagtactcgcggataacccgggtcagttgtgtcaaagcgggggctgctggcccatccgtggtggccataggtacacgtctccttgtgtgctgatgactcttagttcgtggtaagcgttgaggctggcgtacagcgcgaagaactcgttgagcaccgaggcgaacacaaacacttcgccctcccccaggaagccctggggatcgatgctcaagtcgatgcgtaacccgcgaatcggcaagccgtggagcaattggtcgaccgctgtgtggctgaccgagcgcatcgcgcctaatcgtctctcgctgaccttctgcgcctggcgatcgtgatagcgtggtagatcgtaggtttcgaggatcactttcaaggcatggatgtcagtcagtgacaggtagttgagcgacatgttgctgatcagccgccagagaaagtcccggtccagaggtggagtaaaactggctgtcggtgcgcagatattccggaacgacagcccttgcggcgtctgctcgcaagcctggttgatagcgccgacctgcaattgtcgaggcaggttgtgattggtgcacgtcagctcgatcgacagtgtttgctggtccaactccagaccgctgcccaacccgagccaggtatccagcccggtatgctgcgccgatggccgctggcgaatgctgtaactcgccggcccctgggaacgcgcggtatacccctcatgctcgaaggattcaaagggcacgtaggcctgatatcccagccctccgggatgccaacccgtgacgctgtctacggaaaatacactggcgttcccgcgtgagtactcaccagggatcagcaggtattcgtcctgttttccgtccaggcggatgggtaccgcgtcatgcttgaacaggttgacgatgggggtgcagtacagcttcacgttatccaggctgggctgtctgggttctcgccatggcctgcccaatcggaagcgcaacaccacgccgcacacctgcttgagcagttcgccaggtaatctttgcagtgcccccaacccgcccacatcgacaaacaggtacttgtcgggaaaggcaaaatactcctgcagatggcgatagccgccaaacgtattcggcggatacggaatcagcgcctgctcctcgctgaaccctaccggctgaacctgatcggcgcccagaaacagcgatatcacttgcccatccaccccgtgaatcggcatgccatcccgaccgaaaggcagcaactcgataccctccagatgacgcaacagactcaggtacaacgcctggctgatgtagcgatcccccgccagatgcagacgtaactgatcgaagtgccactcactgaagttgccttctgcactcatctccaggcgcaggctcaaacttccccgttcagcctgggcgctgtagtccagcgcactcagctgcaacggcaaaacctgagtggcgtaacaggtacgaaagcggcatcgttcgtcattgactgcggcactttcaaccggcgtatcgcgcgcgacccacacaccagggcctgagtgtttcagcggatcaaactgcaggatgctgaaggcaggcagcgggcgcatgtagttgggccagagcaactgcatcagcgaatgcgtcagctctggaagctcgtcatccaatttctggcgcaagcgcccggtgagaaacgcaaagccctccagtaaccgctctacgtccgggtcctgaccggcttccgcaagaaacggagcaagcgccggattgcgctcggagaagcgtcgaccgagctgtcgcagcgcactgagttcgctctggtagtaacggttaaaggtcatcaggcatgacctctacccgaccggaatcagagagccgcgcggtaaacaccaccggttgagcgacacccttgaccaccagggtggcttcgatagcgaaggcaagtgccagcgggtcatgatcccgtggcaacgtcatcacttttacctgcttcaagcgcggctcgtaagctcggataaatcgctcgatcaacagacgtgactgactcagcgattcatgcaggctctgattcatatcattgaggtcgggcataccgtagtccggcagtgtctgaacgctgccggcacggatactgagcattttccccagatggtgcgcgacagatgtcacgctactggcgggggttgccgccggacgctcaaggcgctcgaacaggcttcgataaccgcgcacttcctggtccttgctcattctttgtcgagcttgccgacgagggatagcgtgaaatcagcgcccatgtacttgaaatgcggtcgcacactcaggttgacgcgataccagccgggctcaccctcgacatcactgacgacgatgcgtgccgcccgcaagggccgtcgcccacgcacttcggcgctggggttttcctggtcggcgacgtactggcgaatccatttattgagttccagctccaggtcagtgcgctccttccatgaacccaattgctcacgctgaaggaccttgaggtaatgggccaggcgattgaccaccatcatgtacggcaactgggtacccaggcgataattcaactcggcttccttgccctcggggctgagcccgaagtgtttcggcttttgcaccgagctggcggaaaaaaacgccgcattgtcactgcccttgcgcatcgtcaaggcgatgaagccttcttgcgccagttcgtattcacgacggtcggacaccaacacttcggtggggatcttggtttcgatttcccccatgctctggaagtgatgcaacggcaagtcttccaccgctccaccactttgcgggccaatgatgttcgggcaccagcggaaccgcgcgaaactgtcagtcaggcgcgtggcgaaggcgtaggccgtgttgccccacaggtagtgctcgtggctgttgaccacgttttcctgataggcgaaggtcttgactggacactcaagcggatcatatggcgtacgcagcaggaatcgcggcacggtcaagccgatgtagcgcgcatcttcgctttggcgaaagctttgccatttggcaaattgcgggccttcgaaatggtccttcaggtccttgaggtcgggtaaaccggtgaaactttccaagccgaaaaacgccgggccggcagctgcgataaatggtgcatgggccatgcaggccacactggaggcgtactgcatcagctttacatcgggggcgctgggagacaggaagtagttggcgataatcgcgcccaccggctggccaccaaactgcccgtactccgcactgtagatgtgtttgtacaacccggactgggtcacttccggcgaatcttcaaaatcttccagcaggtcttgcctggagacgttcaggagttcgatcttgatgttctcgcgaaagttggtgcgatcgaccagcagttgcaagcccttccaggacgcttccagcgcctggaagtcgggatggtgcagtatctcgtccatctgcaggctgagcttggtgtcgatctcggcgatcatccggtcgaccaggcgtttcttgacgggctcgccacggttctggggcttgatcaactcttcgatgaacgccgagacaccgcgcttggcaatgtcataggcgtcgtcgtcggcgctcagtaatgtctgggcaacgatgttatcgaggatgctgtactgatcagaaggtcgtgccggcagcgaatgctgttgtgtcgtcatggggtcagtgtccttttactgaaaaatgtcaggcgtcggggctgtccagcccaagttccgccagtacccgtgcgcgggactcatcgtcggccagggtttgttcgatcgccttgcgaaagctcggggtgttgcccaacggccccttcaacgccatgagtgcctcacgcagcgccatcagcttgtgtaactcgggcacctgttccaccaggttcgccgggttgaaatccttcatggcattgatgcgtacctgaatggccaactcgtcaacgccagcctcttcctgcaaacggttgggcacgctcaacgtcaagctcaatgcctgcttggccaacacgtcatccagggtgttcttgtcgatagcgatgggcttgcgatcttcaagcttgcgcgcgtcctcacgctgggtgaaatcgcccagtaccaacagcttcaatgggagctcgacttcttcctgcgccccgccgattgcgggtttgaacgtgatattgatacgttccttgggggctaccgaaccttctttggccatggtgtctctcctttttcaagtggctcgaaagcctattcaagtaccgcttccagatcgaagaggcacagcctgcgatgggtgtcttccttgcgttcgcgcacggcatggttttgtggcagcaggtcgcagcagcggtgcaggagctgcgtcacttccagggccagctctggctcccagcgctccaggcccgtgcgttgcagttcgtggtcaagctgttcgagctggatcttcgccagctcatgcttgcccgcctgtatgcacagacgcgcttgggcgagccgccaatgaaaacgtgcgcgatcactgcgcgcagcctgcatgccttgcttgagctctcggatggcagacttgagcccgtcctggcgcagccgctgtgtcaccgtctgcaaggcgatcgcccagggctcggcttgggcatcaatgagtgctgcgggcaattcaggcctgtgcaggtgatgggcaacccgctgggagatccagtcgcgagtggctgcgtcggcaaagggtgcgccgtcgtgaaaacgaaacgcaggcaggtccggcaagcgttgcagcaacagcgcgaaggtcacttccagctcggtcatggccaggtcggcctgcaggacctccaggcattcccagagcatgcgcagaccatcgaaccagaacatcgccccggcaagactggcctcaagctcaagcaccaggtctgcgtgatggccttgtgcaaagcgctcctgataacgcttgagcttgtcgggagccggcccgcgcaatgcggtcacctgctcgttatcggcattcgggtagctggcgagtgccagccatgccagtgtccggctcaaacgcaacgcgcgcaggtcggtggcgttctggcgcagccaccaggcacagagtgggcgggcctgctcctgcaaggtacggagcaccttgtgcgcgtccttttcgctctccaccgctgcttcgggcttgcgcagttggctggcggcctgcttgacttgctcgataaccccgctcaaccccgccaccggggtatcgtcctgcgctgcccgctccaatcgctgcgccaattgcctgcgaaccggcaacagcagcggcgcatcatcccccaggtgctcggcccaaagctcgtccagacgcaccaggtgctcaagcacggcgcggaacaaaggctgctggttctgcagcgccaggccctgcgtgaacagcggctcaaggcgcaataccagccatccgaatgcggcaccgcgggtgcgcggtttttccgggtagagcaccgaccactgatgctcacagaggtagcgcaacatcccgagccccgccagcagccccgggtaggattcacgctggtgcaacgcccaggtcaaccacacagccacccgcagatccttggactggtggcgtagcaggttctcgctggtttccagcaccttgtgccagtcgggctggctgccggcatgaatcgattgtgccttggccagctcggactccagcacttcatattcactcgaaaagcgcatgtcgctaccggcaaaacttgtttgcagacagggtgatcgtgcaacttctagataataatcataccggctatccgaataaatcattttccaccatgcacaactaaaaaaccaaacaaaccaactaaccacgcaagtaatgcgtgacagtgggctatcttgagttcgcattttcctgcgaagccctcgaaccttagtcatgcccaaaacattcagcaagcgatggaattacacttagtccttttcctacaaacccagctaccaccgggaatgcgcaggattttgcgcacctaaccctgcatagtcattcaactaatcatccaacttcagcatttatcgacatttcaagatgagcaactaaatgcgcacccatgcgcaatcaaatacacgtaattaagcccagtagcagcctatcgcgctgaatatccgacctactacaacagcatcaccctgattccattggcgcctgcactttcaggcacgcttcttgttataggcatttgcccagccgaaaacttatcggttggaactacctcatcaatcagacaaggaaccccgtcatgccaacacccgcgtatctctctattaccggtgtaaaacaaggtttgatcacggcaggcacgtttacccaggactcggtaggtaacatttaccaggaaggccatgaggaccagattctggtccaggcgttttctcatcaggtgatcattccccgcgacccacagtcgggccagccaaccggccagcgggtgcataaacccctgatgatcagcaaagtgttcgataagtcctcgcccctgctcttcagcgctttgaccagcggcgaagaggtcaagtgccggctggaatggctgcgcacttcgtcggccgggacgcaggagcattacttcaccatcgaactggagggggcgaccatcgtggatatccagtcacgcatgcccaactgccaggaccccgacaacgcccatttcactcacttggaagatgtgtacttcacctatcgcaagattgtgtggactcacgaagtgtccggtacttccgggtcggatgactggcgcagcccggttgcgggttaaaccggcttgacgcgggcgcggcgccaaggaaggcgccgtttccgtaaggcaactacaccatcgccaaaggatgcttgcgttttggcgcgccgaatacccgatcgatcgcgtccaggtcgtgctcatccaacaccagcttggctgctgctgcgttgagtcgcacgtgctcgggcgtaacggccttggggatggcgatcacaccgtcctggcgcaacacccaggccagggagacctgggcgggtgtgacctcgtgacggcgggcgatctgcttgagggtggggctggacagcagttcgccgccctgggcgatcgggcagtacgccatcaagggcaagtggtgctgttgccaccagggcagcaggtcgaactcgatgccgcgttcttcgatgttgtagagcacctggttggtggcgcaggccggggaggcaagttcctgcaggtcggccacgtcgaaattggagacgccccaacgtccgatcttgcccgcttcgcgcaggcgttcgaaggcttcgaccgtttcttccagcgggtactggccgcgccagtgcagcagatacagatcaatgtagtcggtgcccaggcgctggaggctggcctcacaggcacggggcacgcccttgtggctggcattgtgcgggtagaccttgctgaccaggaacacctggtcgcggcggccacgaatggcctcgccgaccaccgtttcagcgccgccctccccgtacatttcggcggtatcgatgagggtcatgccctcgtcgatacccagttgcaacgccgcgacttccgcgcggtgctggtcggggttttcgcccatgcgccaggtgccctggccgatgacaggaacgggaacacccgccagatcaatggtatgcatgacaacctcctgatgagttcgcgaattaacagtgtggcattggccggacaaaagggttcaatcgaagtatggttagcctctgccaagtcgccaggaagtctctgcaatgctgtttgtcgtcatgctcgggggtaagcacccacgggcgaaaattgaagtgcacgatgtggtgtttgcagtggcggacacgctggaagcagcctacgcgcaactgcgcgccgattggtttggcagccccaagggcgtgcatatcgactcctggatggcggtggatggcgtcgacggctggaaggtcgaactcagccccctggcacctgccgccggcgcacaccacctgtacttcatcaacctgggcggttatgaggccaacagttttggcgaggcccaccactacctcctggtggccgcccgcaataagcaggaggccacgaacaagggcaagcaacagatgctgcgtcactggtcccaggcccataccgatgaagtactggacatcgacgactgcttgcccatcgacctggtggacggtcgctatatccacctggtgcaaggcccgcatcggccgatcatccagcagaacgactacatcgtcctggcctgaaccctacccgacagtgcatgcgcagctcatcgaatggctcacccacagcggcgctatggcccgtgcctgagccactcgggcaatccggcggaactttgccgggaaataaccgcctgaatccggtaggctcaccttttttattcaaggagttacttcccatggccaaagccaccgcccgtcacatcctcgtttccactgaagacaagtgcaacgaactcaaggcccaaatcgaaggcggcgctgatttcgcagaagtcgccaaagccaactccagctgcccatccagccgccaaggcggtgacctgggttcgttcggtccgggccagatggtcaaggaattcgacaccgtcgtgttcagcgccccggtcaacaccgtgcaaggcccggtaaaaacccagttcggctaccacctgctcgaagtcaccagccgccaggactgatcccgcctgtgctgatgcaataaacaacggcccgccttttggtgggccgttgtgcatgtgatgactggcgacgctgatgccgttagcgtacaaatcccttttcttcttcatacggcgttcaaggctgacaatgcgattggctttttcttacttctttagctcgtccctggcactgctgctggccagcactgccgtgatcgcggcgcctcaaccgtacctgacggtgtatggcgaaccggccaagtaccctgccggctttacccatttcgactacgccaaccccaacgcccccaagggtggcagcctgcgccgctcggccatcgagatcgggcgcttcgaccatgtgttgccgtatatcgacaaaggcatcggggtgtcccaggtcgacggctggctctacgcgcccctggcccagcgctccctcgacgagccctacacggtctacggcctggtcgctgaaaaaatggagcgcgccgacgacggcctgtcgctacgctttttcctcaaccccaaggcgcgctttgccgatggcaagccgatcaccgccgaggacgtgcgctacagcttcgacctgctgatgacccagggcagcttgcgctttcgcaccctgttcgccgacgtcaagcacgtcgaagtcgaaggcgagcgccaggtgcgtttcgatttctccagcaatgaaaaccgcacactgcccctggatatcgccaccctgcctgtcttccctgagcattggtggaagacccgtgactttgccaatggcggcggctatgaagccccgttgggcagcggcccctataaagtcagcaagatcgactccggcagcaccatcacctttacccgcgacgcgagctggtggggcaaggacttgcccgtcagccgcggcctgtacaacttcgatcacctgagcctggagtatttcggcgacaccgaagtggcccgccaggtattgcgcggcggcgcctacgatttcaaccgggagttttccgccactgggtactccattggctacaacggcccggccctggatgatggtcgcctgcaacgcgcgcacctggccagggagatgccgcaaccggcccagggttacgtgttcaacgtacaaaaaccgatattcaaggaccgccgcgtgcgccaggccctggcgatgctgtgggattttgaatgggccaaccggcaaatgatgcggaacatgtacatccgccagcagagttacttctccaacagcccgctggccgccagccagccgccaacaaaagaagagctagcgattcttgaacccttgcgcggccaggtccccgacgaggtgttcacccaggtgttcaaggcgccggtcactgacggcagcggtgtgatccgcgacaagcagctgcaagccctggccttgctggaggaagccggctggaaaccagagggtgacaaattggtgaacgccgaaggcgaaccactggaattcacgttcctcaacactcagaacggcctcgaacgtctgttgttaccgtacaaacgtaacctggcgcaaatcggtattaccctgaatatccgccgtatcgactcctcgcaatacgtcaatcggatcatggccagggactacgacatgatcgtcatcggtttccccgtcaccacgtcaccgggcatggagctgtacaactatttcggctcggcggccgcctacgatccaggcgccaacaactacgcagtactcaaggaccccgccgtcgacagcctgatcaagggcctggtcaaggccgatacccaggcgcagatgctcacctacgcccacgcgctggaccgggtgctgcaatggaactacctgtggatccccaattactacccgcccggcacgtccgccgcgtggtggaaccgtttcggccgcccggccatcgaggcaaagaacgacgaagccctggaaacctggtgggaaatcagccccacgccgctgacgaatgaacaaatgaacgctgagctgaaaaaacgcggaggtgcgcgctgatgtttgcctatatcgtgcgacgcctgctgctgatcatcccgacgctggtgatcatcctgctggtgaatttcgtgatcgtacaggccgcccccggcggtccggtggagcaagccatcgcccacctgcaagggatcggcggcggtggcgtcggcggttcctccggcgaaggcatcagcggtggctcccgcgccagccggggcctggacccgaagctgatcgctgacatcgagaaacagtacggcttcgacaagcccgcgccggagcgcctgtggctgatgctcaagagctacgcccaactggacttcggcaacagcttctttcgcggcaagacggtgatcgacctgatcctggaaaaaatgcccgtgaccatttccctcggcctgtgggccacgctgatcacctacctggtatcgatccccctggggatccgcaaggcagtgcgccacggcagcagttttgatgtgtggagcagcaccgcaattgtcatcggctatgccatgccggcgttcctgttcgcgatgttcctgatcgtggtgtttgccggtggcacttcgctgaactggttcccggtacgcggactggtgtcggagaacttcgaagagctgagcaccgtgggcaagatcgccgattacttctggcacctggtattgccggttacttcactggtgatcggcgggtttgccacgctgaccatcctcaccaaaaactcgttcctcaatgaaatcacgcgccagtacgtggtgactgcccgcgccaaaggcttgagcgaacgacgcgtgctctacgggcatgtgttccgcaacgcgatgctgctggtgatctccggaattccccaggcctttattgccgtgttctttgccggttcgctgctgatcgaggtgatcttctccctcgacggcctgggccgcatgagctacgaggcggctgtgtcccgggactacccggtggtgttcggttcgctgttcatcttcaccttgttcggcctcttgataaaactcatcggtgacctctgctacaccctggtggacccgcgtatcgacttcgccgcgaggaacgcctgatgcttaatctgtctcccgtggcgcgtcggcgtttcgagcggttcaagaaaaaccgtcgcggctggtggtcgctgtggctgtttatcggtctgtttatcctgacactgggcggcgagttgatcgccaatgacaaacccttggtgctgagtttcaagaacgagctgtatttcccggtgttcaagcgctacaccgagcaacagttcggcggccagttgccgttccaggccgattaccgcagtgactacgtgcgaaagctgatcgagcaggacggcggctggatgctgttcccgccgattccgttcagcgacgacacgcccaactacgagctgacccgccctgcccccagcccgccctcggcggtgaactggctgggcaccgatgaccagtcgcgggatgtgctggcgcgggtgatctttggcgcgcgcgtgtcgatcctgtttgccctggcgctcaccgcgatcagcgcggccatcggtattgccgccggtgcgttgcagggctattacggcggctgggtggacctgatcggccagcgtgtgctggaagtgtggtccgggttgccggtgctgtacctgctgatcatcctgtcgggttttgtagagccgaatttctggtggctgctggggatcatggcgctgttttcctggctggccctggtggacgtggtgcgcgccgagttcctgcgcgggcgcaacctggaatacgtcaaggccgcacgggccctgggcctgggcgatggcaagatcatccgccggcatatcctgcccaacgccatgacggcgaccttgagttacctgccgtttatcctgaccggtgcgatttctacgctgagcgccctggatttcctcggtttcggcatgccggcaggcagcgcgtcgctgggtgagctaatcgctcagggcaagcagaacctgcaagcgccgtggctgggcctgaccgcgtttttcaccctggcgctgatcctgtcgctgctggtctttatcggcgaggcattgcgtgatgccttcgacccacgctcatgagtgactgcctatgaacctgatcgaaatccgcgacctcagcgtcgcgttcagcggccagaccgtggtgcgcaacctgtgcctggatgtgcgccccggcgagtgcctggcactggtaggcgagtcgggctcgggcaagtcggtgacggcccactcgatcctgcaactgctgcccgaggccggcactaaaaccaccggttccatcaagtaccgtggccaggaactggtcggcgcttcgaccgccaatttgcagaagctgcgcggcaaccgcattgccatgatcttccaggagccaatgacctcgctcaacccgctgcacagcatcgaaaagcagatcggcgaaaccctgctgctgcacaagggcttgggcggcaaggcggcgcaggcgcgcatcctcgaattgctcgaactggtgggcatccagaagcctcaggagcggctcaaagcctatccgcaccagctctccggtggccagcgccagcgggtgatgatcgccatggccctggcctgcgagccggaactgctgatcgccgacgaacccaccacagcgctggacgtaaccgtgcagcgcaagatcctgctgctgctcaagtccttgcaacaacgtctgggcatgtccctgctgctgatcagccacgacctcaacctggtgcgcagcattgcccagcgcgtatgcgtgatgcgagccggcgagatcgtcgagcaggccgactgccagacactgttcaacgcgcctcaacacccctacagccgcctgctgctggatgcagaaccggccggcgatgcactgtgcagcgatgcacgcgagacggtgttgcaggtggatgacctgaccgtgcaattcccccttggcggcgggttgttccggcgcaaaacgtatttacgtgcggtggatggcatcagcctgagcgtgcagcgcggcaagaccctggggattgtcggcgagtccggctcgggcaagtccaccctgggccaggcgatcctgcgactgctggactccagcggcagcatccgcttccagggtgaagccctcgacccgctgaaccaccagcagatgcgcccgtggcgcaagcaaatgcaggtggtgttccaggacccttacggcagcctcagcccacgcatgaccgtggagcagatcatcagcgaaggcctggaggttcacgcaccgtgcagcctggccgaccgcgatgcgcaggtggtgcaggtgctcaaggacgtgggcctcgatcccgccagccgccatcgctacccccacgaattttccggcggccagcgccaacgcatcgccatcgcccgcgccctggtgctcaaaccggcgctgatgttgctcgacgaaccgacctcagccctcgaccgcactgtgcagaaacaagtggtggcgttgctgcgtgagttgcaggagaaatacggcctgacctacctgtttatcagccatgacctggcggtggtgcgtgcgatggcccacgacatgattgtggtcaaggacggcaaggtggtggaggccggcgtgagccatcaggtgtttgatgctccgcagcatccgtacaccaaggaattgctggcggccgcctgcgggctgtcgtcatgagtaccagcctgacggattaccaacaggttcgcggcctggccatccagtcgctgttcgagatcatcgagcagtccagcgaaggcacggtgattgtcgaccgcgacgccaatatcgtgtggatgaacgagcgctacgccaggcgttttggcctcaaaagcgccgacgaagccatcggccagccgtgcgagcaggtgatttccaacagcttgctgcgccaggtggtacgcaatgaccagcccatattgctggacatccaggacacgcccaaaggcccgttggtggtgatgcgcttgccgatccacaacgacgccggcgcggtgatcggtgcgatcggctttgccttgtttgatgagctgcgcaacctgtcgccgctgatcgaacgctacctgagcatgcagcaggagttggcgtcgacgcgctccctgctgcgttcgcggcagagcaaatacaacttcgcgcattttatcggcaccagcgccgccagcctcgaagtgaaacgccgcgcgcggcgcagtgccagcgctgaatcgccggtgttactgctgggcgaaaccggtaccggcaaggagttgttggcccaggcgattcacggcgcctccacccgtgcgcacaaggcgtttgtcagcgtcaacagcgcggcgattccggctgacctgctcgaagccgagttcttcggcaccgcaccgggcgcgtttaccggcgccgaccgcaaaggccgccccggtaaattccagattgcccagggcggcacgctgttcctcgacgaaatcggcgacatgcccctgcccttgcaaagcaaactgctgcgggtgttgcaggaaaaggaattcgaaccggtcggttccaacgagatgctgcacagcgatgtacgggtgatcgccgccacgtccatggacttggaggcggcgatcaagcgcggcgaattccgcgcggatttgtattaccggctgaatgtgctgccgatccaggtgccgccgttgcgtgagcggcttgaagatattccggcgttgagcgaggcgattctggaggaactgcgcagccagcatgagctggaccgtgaagccctggcgttgctggcccagcatgcgtggccagggaatatccgcgaactgcgcaacgtacttgagcgggcggcgttgttgagtgatgaccttgtgttgaatgccggggagattcgcgccgcgatcggcaccttcacccccgtggcgcgtggcagtgccgtcgcgacggtcgagggtgaaagcttcagtgcggcgcgggagcggtttgatcggcagatcatcgcggcggcattgagcgcgtgcgaggggaatgtggtggaagcggccaagcgactggggcttgggcggtcgacgctgtacaagaagatggtggcgttgggcatcgactgatctcaaaatggagacacagctctcaatatagagataacccaatgtgagagggggcttgcccccgatggcagtgtgtcagtcaactcataggtgactgaagtaccgctatcgggggcaagccccctcccacattggtttatcatttgtctcaagctagagacaatattcggaacatccaaccacaacctataaattattcataaatttcaataagttaagaacatggcacatatctcgctatagccctctcctaaagcaacaccccacaaaaataacaatccgatggagacacaccatgagtgtgatcattgccctggcagccctcgcgctgctgatgctggctgcctaccgtggctatagcgttatcctgtttgcccccattgccgccctcggcgctgtcctgctcaccgacccgtccgccgtcgcccctgcgtttaccggggtgttcatggagaaaatggtcggttttatcaaactgtatttcccggtgttcctgctgggcgcggtgttcggcaagctgatcgagctgtcaggcttttcgcgctctatcgtggccgcggccattcgtttgcttggcacacgccaggcgatgctggtaatcgtgctggtctgcgccctgctcacctacggcggcgtgtcgctgttcgtggtggtgtttgcggtgtatccatttgcagcggagatgttccgccagagcaatatccccaagcgcctgatcccggcgaccatcgccctcggcgcgttctcgttcaccatggacgccttgcccggcacgccgcagatccagaacatcatccccagcaccttcttcaacaccaccgcctgggccgcgccgtggcttggcttgatcggcacgattttcgtgttctgcgccggcatgctctacctggcgcgccagcgcaacaaggcgcaacttgccggtgaaggctatggcacggagctgcgcaacgagccggaaaccgccgagaacctgaccctgcccaacccctggatcgcgctgtcgccgctgatcctggtgggcgtgatgaacctgctgttcactcactggatcccgcagtggtacggcaagacccacagcctcagcctgccgggcatgagcacgccggtgaccaccgaaatcgccaagctcaccgcgatctgggcggtacaggcggcgttgctggtggggattatcgtggtgctggtgttcggcttctcggcgatcaagagcaagctggccgaaggcagcaaaagtgcggtcagcggtgcgctgctggcggcgatgaataccgcctcggaatatggttttggtgccgtgatcgcctcgctgccgggctttctggtgctggctgactggctcaagagcattcccaacccgctggtcaatgaagcgatcaccgtgaccctgctggccggtatcaccggctccgcgtcgggcggcatgagcatcgccctcgcggccatgtccgaaagctttatttcggcggcccatgcggccaatatcccccttgaagtgctgcaccgcgtcgcggccatggccagcggcggcatggacaccctgccccacaacggcgcggtgatcacgctgctggcggtcaccggcctgacgcaccgcgaagcctacaaggacattttcggtatcacgatcatcaagaccctcgctgtgttcgtggtgatcggtactttctacgccaccggcattgtgtgaggtttgcatgacgacattgaacggcaagaccgccctggtcaccggctccaccagcggcatcggcctgggcatcgccctgagcctggccaaggctggcgccaacctgatcctcaatggcttcggcgacgccagcgcggtgatcacccaggtacaggcgttcggcggcaaggtcggccaccacccggccgacgtcagcgacccggcgcagatcgccgacatgctcgcctacgccgagcgtgaattcggcggcgtcgacatcctggtcaacaacgccggtatccagcacgtggcggcggtggaagacttccccgtcgagcgctgggactcgatcatcgcgatcaacctgtcctcggtgttccacagcacgcgcttgagcctgccgggcatgaaggccaagggctgggggcgtatcgtcaacatcgcctcggtgcatggccaggtgggttcggtgggcaaggctgcgtatgtggcggccaagcatggcgtgatcgggttgaccaaggtggtcggcctggaaaccgccaccagcaatgtcacctgcaacgccatctgcccgggctgggtgctgacgccgctggtgcagaagcagatcgatgatcgcgccgccactggcgtcgacccgcagcaggcgcagcacgacctgctggcggagaagcagccgtcgctggagtttgtgacgccgccgcagttgggtgagctggtgctgttcttgtgcagcgaagccggcagccaggtacgcggtgccgcatggaatatcgacggcggctggctggcccagtaacagcggacactggcgttcaaaatgtgggagggggcttgcccccgatagcggtgggtcagtcaccccatgtatcaattggcactccctcatcgggggcaagccccctcccacatttgaactgtattgtgtggaagacctagataagaacaagagaccttgctgatgtccgacattctctggcaaccctccccggaacgcatcgccaacacgcgcatggaccagttccggcgccacatcaacaagcgttacagcgtgcagcttggcgactacccggcgctgcaccagtggagcatcgaccaacgcccggatttctggcgggcgatcgttgactatttcgacgtgcagttgcgcagcccgcccaccgcggtgctgatcgaagacgccgagatgcccagcgcccactggtttcccggcgcgacgctgaattttgccgaacacctgctgcgccggcgtgatgatcacgtcgccgtggtggctatcgcagaagacggccagcgcgagcaactgacctatgccgagctggccgcccacgtcgccggcctgcaacgcagcctgcgcgctgccggcgtgacccaaggcgaccgcgtcgccgcgtgcatgcccaacacctggcaaaccctggtgggcatgctcgccaccaccagcctcggggcgatctggtcgtgctcatcaccggacttcggcacccagggcgtgatcgaccgcttcggccagatcgaacccaaggtgcttatcacctgcgccggctaccgctatgctggcaaagacatcgaccagaccaccaaactcaatgaaattctcgcgcgcctgccgtccttggagcagttgatcatcgtgccgtatgcgcgcccccaggccaggatcgaggactatcagacccacgcccgcgtcgcgctgtggcaagacgtctaccaacccggcggcgagcctgaattcgtcgcggtaccgttcgatcatccgctgtacatcctctactccagtggcaccaccggcgtgcccaagtgcatcatccacggcaccggtggcgtgttgctcacccacctcaaggaacacggcctgcacgccgacctgtcccgcgaggactgcctgttctactacaccacctgcggctggatgatgtggaactggctggtgtcggtcttggccctcggcgccacggcggtgctgtatgacggctcaccgtttcaccccggccccgagcgcttgatcgacctgatcgatgcggaaaaaatcagcgtgttcggcaccagccccaagtttctcgccacgttggaaaaggccggattgcggccgcgcttgagccacgacctgggcagcctcaaagggctgatttccaccggttcgccgctgtcaccgcagagctacgactacgtgtaccgcgagatcaaggatgagctatgcctatcgtccatgtccggcggcaccgatatcgtctcctgctttgtgatcggcaacccggtgctgccggtacggcgcggtgaaatgcagtgcaagagcctggcgatggctatagaagtctgggacgaccagggccggccgctggtcggcgaaaaaggcgagctggtgtgcacgcggcacttcccggcgatgcccatcggcctgtggaacgacccggaccgccagaagctgcgcgcctcgtatttcagccagtttcccggcgtgtgggcccagggtgactatgccgagcaacgcccgaatggcagcctgctgatccacgggcgctccgacgccgtgctcaaccccggcggtgtgcgtatcggcactgccgagatctaccgccaggtggaaaaagtcccacaagtgctggaaagcctggccatcggccaacgctggcaggacgacgtgcgcgtggtgctgttcgtgcgcctcaatgacggtatcgaactggacgaatacctcgaacagcagatccgccaggtgatccgtgccaacaccacaccgcgccatgtgccggcgaagatcctcgctgtcaccgatatcccccgcaccatcagcggcaagatcgtcgaattggcagtgcgcaatgtggtgcacggcgagccagtgaagaacaccgatgccctggccaacccccaggcccttgatcagttccgcaatcgcccggaactggcgcaaggatgaaaggtttcagcgctgacgtactcatttgaagacaaacccccaatgcatgctatttttcgggggtagtcacccatcgccgactgacgggataatgggtgttgtcatttttcaaagcgttacgctcagggctttttcatgattggaacatccgccggcagcgaagccgccgcattgattgcgcggctggactgggcgcaaagccctctcggtgaggccaaagattggccgcaaagcctgcgcacggcggtcgatatcgtcgtgcactcgccgatgccgatgctcctgctgtggggcaaccagctcacgcaactctacaacgacggtttcgcccaactggcgggcaacaagcaccccgaggccatgggccagccggcgcaccagacctggccggagcttgagagctttaccgcgccgatctacgacgccgtgctcagcggccaggtgcgcaccttcagcgagcagcgcttcgtactgcaacgccacaatcgcgacacggaaatctggctggacctcacctacagcccgatccgcgatgaaaccggcagcgtggccggcatcctggtcaccgccatcgaaaccaacgaacggcgcaaggcccagcacaacaccgagcaacgcctgcaactggcactggcggccaccgacgccgtcggcacctgggactgggacattggcgaagaccgttttatcgccgacacgcacttcgcctacctgcacggtgtcgaccccagcgatgcaagccggttgccgatcagcgcctacctgcaaggcgtgcacccggatgaccgtggcatggtggcgcgcagcatcaagcattgcatcactttcggcaccgaatacgccgaggaataccgcctgctgcaagccgatggccaactgcgctgggtgtttgcccgcgggcgctgctacaaggaccatcaaggccgcccggcgcgcttcctcggcgccgcgctggacctgaccgagcgtaaacacaccgagcaggcgttgcgccaaagccagaccgaactgcagttgatcatcaacgccatgccggtactgatcggttatgtcgaccatgaacagcgctttcgcctgaacaacagtgcgtacctggagtggtacggcatgacgccccaggaactgtacggcaagaccattcgcgaagtgctcggcgacgaggtgtacgccgggcgtgaagacaagatcgccgctgcgctcaagggcaaggcctgcagcttcatgaccattacgccgcaccaggatggtcgaccacgccatgccctgatgaagtacctgccacgcttcagcaatgacggttcggtgaatggtttctacatctttgtaatcgatgaaaccgaacgcaagctcaccgaagaagccctgcgtcacctcaatgaaaacctcgaagaacgtgtggcccagcgtacccaggcgctggccgaggccaaccagcgcctgcagaacgagatgttcgaacgtgaacgcgccgaagatgcattgcgccatgcgcagaagatggaagccgtgggccagctcaccggcggcatcgcccatgacttcaacaacatgctcaccggcatcatcggcagcctggacctgatgcagcgctacatcgccgccgggcgcagtgacgagatcgggcgcttcactgatgccgccgtgtcctccgcccaccgtgcggccgccctcacccaccgcttgctggcgttctcgcggcgtcagtcgctggaccgccgcccgctcgaccccaaccagttggtggcctctcttgaagagttgttccgccgtaccaaaggcgcgcatatcagcctcaaggtgcagctcggccatgacatctggccggtgaacaccgacgccagccaactggaaaacgccctgctcaacctggtgatcaacgcccgcgacgcgatgcccgatggcggagaactgctgatcgaaaccgccaacagttacctggacggcaccgacatcaccaccctggaaccggtcaaggccggtgactacgtgatgctcggcgtgtgcgacaacggcaccggcatggcgccgaagattctggccaaggcgttcgacccgttcttcaccaccaaacccatcggccagggcacgggccttgggttgtcgatgatctacggctttgcccagcaatccggtgggcatgtgaccatccacagcgaaccgggccagggcacctgcgtgcgcctgtatttgccgcgcctgcacggcacctccctggaaagcagcttgcccgccagccacagtgaagcgccggtggccctggccggtgaagccgtggtggtggtcgaagatgacccggcagtgcgcatgctggtggtcaatgtgctcgatgaactgggctacacggcgcaccaggcgggcgacgctcgggccgcactgccgctgctggagtcggatctgcgcgtggacctgctggtgactgacgtcggcctgccaggcatgaatggccggcagcttgcggaaatcgcccgccagcaccggccggggctgaaggtactgttcatgaccggttatgcggaaaaagccgccgagcgccagggtttcctggaagacggcatggacatggtggccaagccgttttccatcgagctgctggcgacaaaaatccgcagcatgatcaacgccaacgaatgagttcaggcataatcgcgcgccgtcgcacacctggtagagatcaatgaaagcccaagcccgtcatatcctggtgaaaaccagcgaagaagccgaacagctcaaacagcgcatcgccaagggcgaggcgtttgatgtgctggccaagaagtactccacttgcccgtccggcaaacgtggcggcgacctgggtgaagtgcggcccgggcagatggtgggggcgatcgatgcggtgatcttcaagaaaccggtgaaggtggttcacgggccgatcaagagcaagttcgggtatcacctggtgcaggtgttttaccgggattgatgggttggctgcagaccgctatcgggggcaagccccctcccacatttgaataggttcacaaatcaaactgtgggagggggcttgcccccgatccgccgcaggcggccattcacccccggggaatcagcgcccccggcacctggataacccgactggccaaccgatgcccagccaatgcagcctgctccggcgagcttcccttgagccgcccggccaggtacgccgcactgaacgaatcccccgccgctgtcgtgtccaccaccttttccaccttgatcgccggcacgcaaaagcgctcgccgttgcagcggatcaggcacgcatccgcgccacgcttgagcaccacctcttcaatccccggatacgccgcgaacacctgctcgctgtcggcatacccaaacagcgcacgctcgtcgtcctcggtgagcaaggcgatatccacttcggccaggacacgctcatacgcagcacgcgccgcctcgacgctcgcccacaatcgcggccggtagttgttgtcgaacaccaccttgccgccacgtcggcgggtttcgatcagggtttgcagcaagcgttcgcggccgacttcacccagtacggccaaggtgataccgctgaaatacaccacgtcatagcccggcagcgcggccaggatcggctcggctgccggcgtggtgaagcagtcgcgcacggcggcttcgttgcgccaatacaggaatttgcgctcgccattggcgtcggtctggatgcagtacaaccccggcagacgtccaggcaggcgctggaccctgcccaagcccaacccttcgtcgatccactgctggcacatggcgtcactgaaactgtcatcccccagggcggtgacatagtcgacgctgccgatgtcgcccagctcgcggcgcaggtacaccgccgtgttcagggtatcgccgccgaagctttggtgcaggctgccatcggcgcggtgttgcagttcgatcatgcattcgccgatcagggcaatgcggggttgggtactcatagtgatggtctcgggtgtggctgatggcctcatcgggggcaagccccctcccacagtttgatgtgtgaacctattcaaatgtgggagggggcttgcccccgataggatcgacgcggtctagaagcaggtaggcagggactcgatcacctgcaatttttcatccaccaggcaaccgacctgccacttgtcgaaggtcaggcaagggtgcgaggtgccgaacgagatgatgtcgccaatccgcaactcaacccccggcgccaccgtcatgaacgcatgctggtccatcaccgccgtaaccttgcagccactcacgtcatcgccttcggccggcacaatacccgccttgtagcgcttgagcggcaccggcagaccggcgtcgtaggccacgtcacgcttgcccagggcgatcaccgcaaagcccggctcgggcaacgattgcacatgcgcccagacttccagggccgggcgcaggccttcgttgaggtcactgcggcggtcgagcacgcagcattgcgcatctttatagatgccatggtcatgggccacgtagctgccggggcgcagcacactgaggaagcggccggcggcgttctgttgttcgaacgactcggcgatcaggtcgtaccaggccgaacccgacgcggtgacgatgggcttgggcaggtcgaaagagccgttgctctgcaaatccaccgccaggcgcaccaggctggcggcgaaatcgcggatgccgctgatggcatgctcgccgtggatcacgccctcatagccttcgataccggtgagagccagggccggctgggccttgatcgccttggccagctcgcgcacttcctgctcgctgcggcaaccgcaacggccgccgaccacgccgtactcgatcatcacattcaggcgcaggccacgggcggcgaagaacaggcccaggtcagcgacgttgtccgggtgatcgaccatgcagtggaagtcgaagtccttgtcggccagcaggtcagcgatcaacgccatgttcggcgcgcccaccagttggttggccatcaacacgcggcgcacgccaccggcatacgcggcgcgggtctgcacagcgttggccagagtgatgccccaggcgcccgccgcgatctggcgctggaacagcgccggcatcatgctggtcttgccatggggcgcgagctgcgcgccgctcttgctgacgaagtcctgcatccaacggatgttgtgttccagcgcgtcacggtgcagcaccagggccggcaggctgacgtcacggaccagatgggcaccgacagcggcggcgcctttttcaacggcattgatggcagacatgaaatgctcctattcgttgatgcgacgagccaggttgttggcgctttcgatcaacacccggcgatagtcgttgtaatttttgatcgcgtcggcgcgcggggcgacgatgcacaaagtcgcaatgctgatgccttgcgcgtcccgcaccggggcggcaaagcaatgggtaaaggtgtcggccacactgtcgaaggaaaagaagccatcgagggtggcctgacggatttgcgccaggaaggtatccagcggcaggcgctggccatccggcaggatgaagtcgtcgtggtcgatcaggtcgacgatctgctggtcgctcaagtgccccagcaacaggcgcccggaggcagtccaggggattggcgcgttttcgccgatatccgaagaaatgcggaaatgccgctcgccctcgcgcatcagcgccaccgtgtatttgcgcccgttgagcaggcacatctgcgcggtttcgcgggtctggctgacgatctcctgcaaggcgtgatcggcctcgcgggtcaagtcgaaatgacgcaggtgcgcctggcccaggaagtacagctggcggccgaggtagacgtgaccgtccttgcccaccgtttccaaaatacgacgttcaagcagcgacgcgaccaattcgtagacagtggatttggggctgccgatgccgctggcaatatcattcgggcgcaggggctggccgatttccttgaggaaatcgaggatatcgaatgcccggtccaggcctttggcgcggcgtttgatggtgtcttcggtcatggcagccttcgattcctgtaaaaatgctgtgatctgcgcagatccttgtgggagggggcttgccccgatagcggcgagccagtgacctgtgcttgtgctgacacaccttcatcgggggcaagccccctcccacattggattttccgtggtttcaagaatggggcatttagccctttttcttgtaggccacgcaatcgatctccaccttgcagtcgaccatcatgttcgcctgcacacaggcccgcgccggggcatgttccggggtgaagtattcgccgaagactttattgaaactccagaagtcccgcgggtcctccagccatacccccacgcgcaccacatctttcaattcgtagccagcctcttcgaggatcgccaccacgttgcgcatggtctgccgggtttgctcaatgatgccgccagtgatgatttcgccatccaccgcaggcacctggcccgagacgtacaaccaaccgtccgcttccacggcgcgggcgaaaggacggggttggccgccgccggcagtactgccggcaccataacgagtaatgctcataacaacaggctcctgattaaaaacgaatgttcttgagaaattccgccaggcgcggcgattgcgggcgttcgaagatgtccttcgaggtgccctgctcttcaatgcggccctggttcataaacacgatcttgtccgagacttcataggcaaagcgcatttcgtgggtgaccagcagcatggtcatgccctcttccgccaggcccttgatcacgctgaggacttcgcccaccagttccgggtcgagggccgaggtgacttcgtcgaacagcatcaggctggggttcatggcaatcgcgcgggcaatcgccacacgttgttgctggccaccggacaactggccgggaaagtggttacgacgctccagaagtcctacacgatccaaccatttttccgcgagcgccaccgcctcgtccttaggcattttcttaactttcaataagcccagggtgacgttttgcaacgccgtcaaatgcgggaacaggttgaactgctggaatgccatgccagtcatcgcccgatgctgggcaatcacgcgctcggggtgacgcacgcgcttgccgccgatgtcgcggtagccgatggactcgccgtccagggtgatctgcccgccctggaactcttccagcaggttgacgcagcgcaacagggtggtcttgcccgagccgctggagccgatcagggtcaccacgttgccgcgctgcatggacaggtcgacgcccttgagcacttccacctggccgtactgcttgcgcaggccactaatgttcagcaagggtgggttggtttgaggttggttcatggcaaggccacccgcttttcaatgtagcgcccgaataactcgatggcgtagttgatgacaaagaacataaagcctgcgaacaggtagaactccagggtcatgaaggtgcgtgcgatcacttgctgggtgctcaacagcaattcggccacgccgatcaccgacagcaaggtcgaggccttgacgatttccgtggaagaattgacccaggtcggcaggatctggcgcaacgcctggggcaacagcacgtagcccagggactgatagaacgtcaggccgatggccttgcccgcttccagttgcccacggggaatggcctgcagcgcgccgcgcacgatttccgaaacgtgggagccgcagaacagcgtcaacccgaccgcaccggcctggaacgcagtgatctgccaaccgagcgccggcagcatgtagaagcacgccaataccaacacaaacaccggcgtaccgcggatcaggtcgacgtacagccggaacggcgcccgcatccagaatttgccgtaggtcaggatcaacccggcgacgataccgatcagggtaccgaagataatcgccagcgcggacacataaacactggcttgaaagcccgcccagagggtatcccgggcgatccacaactcatgcaaccagctgggggattcgtacatggaaaccttccttaacgacggatcgccagacgctgctccaggtaacggagcagcatggcaatgaggtaacaggcggccacgtagagcgcggtcgtgaccaaccaggtttcgatcacccggtagctttcgacgttgatcttgcgggcgtaataggtcagctccggcaccgcgatggcggcggcgagcgaggtgtccttgaacagcgaaatgaagttgttcgacagcgcgggcagcacattgcgcagcatcaccggcacggtgatgtaggcgcggatacgccactcacccaggccgatggccagcccggcttcacgcaagcccttgggaatattcagcagcccggcgcggaacacttcggtcagataagccccggcgtacaacgacaaggtgatgatgaacgacgggatcttgtccaggcggatgcccaggctgggcaaggcgaagtagatcaacaggatcaacaccaggatcggcgtattgcggatcaccgtcacatacaccgaggccagcacgcgcagtgccttgtgtttcgacagcatggcaaatgccatcatcaagccgatcacgcagccaatcgcaatcgacagcagcgccagctcgaggcccaggccgagccccgccagcaagctggggaagtcgcgccacacggcggcaaagttcaactgatagttcatggtcagcagtacctgattggggcgccgtcagcgacgccccaggttttcgatttacttgaactcaaccgggaagccgatcgcaggttccggcaggtccacgccgaaccattgcttgaacgaggccttgtaggtcgggaactccacgccggtcatggcttcatgcagcgcggtgttgacgaagttcagccagtcctggtcgccacgcttgacggcgcatgcgtaggtctgtgggctccaagcgtacgtcgggctgcggtagcggcctgggttctgcaccatcaggtatttgaccgaagactggtcggtggcggcggcatcggcgcgaccagaattcacggcctggtacatcaggtcgacgctgtcgtactggtcgaccttggccttgggcagcgcctggtgcaccagttcttcggcgtagacgttttgcagcacggccacggtgacgctgtcgccggcggcctgcaggtcttcgatttccttgtacttgctgttgttcggcagcagcaggcccacgccttcgcggtagtacggcagggtgaaggccacctgctgcgcgcggctggcggtgacggtgatgaactggcaactcatgtcgaccttgtcggtgagcaggttggggatgcgcgcgtcagaggactgcaccacgaactcgaccttgctcgggtcgttgaacaaacccttggccacgatgcggccgatgtcgatatcaaacccctgcaacttgccatccgctccctggaagtgccacggcgcattggtactgcctgtacccacgatcaggtgcccacgcttgagcacatcatcgagcttgctgtccgccgcctgcactacgcttgcgagggaagccgatgcggcgaagagaaaaacacacgctttgaacacggaaggtcggtgatgcatgacaagcactccaggggttgtgtattccgctataccggaacttagtatgtaacaacggaatagacagcagaaagtgtgccacacgcggtaacggaaaaacacgacatgaataaatctgttttagatcaaatagataaaagatgattcgtgacaaggtgctaaccaacacttgaaatcactttgctacgcaaggccccacacagcggtgacaggccccactggcgtgcgacatagcggcgttaccgcgcaccgttgcagtgcgccggttgcgtggaaaaatccccacgctgggctagccttggcacattcattccaacaaggactccaccctgatgacgtttcgcctcaccctggttttgctgtcctttctggtggccggcaacgctctggccagtaacgaccgccgcgaatgcaaggcagagctgcgtaagctcaacgaagccttgagcaccaattacaccagccagaaccaccatggctaccgccaggcaaaggcctcaagggataacctggaatacaagaaatgcgcgagccaggcgcgtaaagcccgtgaacgcttggagcgtgacagggacctgtgaaggttgacagtagacgactgacgcctccggacttagcgtgagctaggtttctgactggagaacgtcaatgagctatttcaatgcggttatcgagaacaaagaagcttttgaacaagctctggatacaccgctcaccgtgtttgccctgttcgcctccgaaggctgtcacgcatgcaatgtgaccctgccgtggttcgtagaaatcaccaaagcgcaccagggaaaaatcaaggtattgatcctcgactgcgcgaatacgcccagacaccccaaggtcgtgcgtattccaacgctacttatctaccaacaaggtcagttgatgtcgacccttgaaggggttaccgagtcggctctgctccaggcactcgcagagtttgcttgatcaacctggcggttgcgcgacacgaccagcgtctacgcggctcaaagcagtctcagccatcagggtcagccatgttcaagaccattgaagcctaagtcctgaagaaacacccctcatccgccttgcaacttgagttcgcccagcatgatttcgagcgactcaagcccttatgcctgctgatctatatcgcgagcatctgcatctggctcgtgttcgacctgatcgtgagctttccgggcggccagggctttaccggggggccacttactggataatagctcaatgccttcattgagttaatgttcggcaccccctctaccgcctcgatggattttcttctgcgtatggacactcctctgcttccacaaaaacgcctcaatgctgcaatcaccaaagtaatggccggtatcagcgcaacgctgggcgccatgtgggcgctgatcacctatgtgtttcccgaccccagcgtgttcggctttggctttctcaactggaaaaacttgatactggtaatcagcgtattcctgttcctcgcggcagtgtctattggatggcaggcgcgtcgcctgccggacgcgataaaaggcacgctttcggtgatcctggccgtactgctcgccggcggttttttcattctgggtagcgagtacgccaaacccactttcgaatttgcccaatcacaaaagttgatgactgaaaatgacggcgccaacctgtttggcaagcgtatcgagctagtcgacggtgtacgcttcgaactgctggagtgtgagcagattggccaggcaccgagctgcctgctggaactcaccaacacccatgtcgaccgcgaaatgcgcgacctaaagcaaagtactctgtttgaaaaaaccggcggttctctggatgtcgagcaactgcttgttggccagtcaaagtctgaccagtggaacgcctttgcgttagtgcgcaatgtgccgacccgcgtaacgatggtgttccaacccgtgcgcgggaagctggagagcatcccggcactcaagatcaggtttcgcagcctcaagggcgaggataacgtggtcaagttcagtggcgtagcggttaactgaggggatggatatgagcaccgcaactgcaacagagaacgccgaccagccctgggaagctacgttgattctggcgtttcgcgatattcagtggatccttcactgcgaaaaacagcaggcactgatttcagtcgcgcttgcccagttcctcttggacaatcaatcactgctgtgtaatccctcggacccaacacagcaaaatacctgcaatgagaccaagggaaagctctaccgggcagtggaaaaaatggcggtaacgccgccactcctcgcgaaattggacggcaaggctgaaagtgcagcgggcgacgtgctaaccgcccatgaagaccggttcttcctgattgaattcaaatcggacatcagcaccagaagctccgaatacaccaaattcctggggattctgatgtggctgatcgatcccgacgccaaccacgtactgatcaagcggtcaaaaaaggggcatttttttgtcacacagcagcccgacgcatccgcaccctctaacccaaacctgcgcaagctcactatggaggcctacacttactacgacgctatcacccagcccgacttaaaaccgactgcggcgatccccgtgcatacgctcctggcggaaaaacgccacggcctgtcgctggctcacatggcggactaccttcaactgctctgcaaggcccatgtcggtgactcagcaggtggcgcgcacccgatgaaagtggcggtggcaagtgcatccgggatgttctggccgataaccgacctctcggagctgagtgcattggccggcttgttcaacacgaccgcagggccatcgcgcccaacacacccggcatttggcactgcaaacgccaaacacttgaaaggcatcgtcgatgccttccgaaaaaagacgccggcgcagcaaaaagccgcgctcagacgtgacggcagaacacccggcggcgccactccaggcctcaaaggaagctgagtggcaacacttgcacccccatcaggaacccacgcaccgaagcaggctgacctgcgtcacccggcggtcttccacagccgccacggtcaagcaccaaccctcatgctccaggctgtcacccaccaccggcaggcgatcgagcagactcatgaccaggccggccagggtctgatagtcatcggtggcgaccgcgttgaaaccggtacgctggcgcaccaggctgaggttcaaagcgccattggcgcggaacccatcaccctcctcgacgatgtcaggcccttcgatttcgctggcatccggcaactcaccggcgatggactcgagaatgtcggtcatgctcaacacgcccataaagtcaccgaattcgttgatcacgaacgcaatgtgggtggattcctgacgcatctgctccagcgcattgaggatcgagaaactctcgagcaaattgatcgcccgacgtgccaggtgctccaggttcggctcgttgccggccaggtattccttgagcaattccttcttgtgcacaaagcccagcggctcgtcgacggcgccgttgcggatcaacggcagtcgcgagtaggacgaatgcatcagtttcaggcggatactctcgggatcatccgccagatcgatgcagtcgaccttggcccgtggcgtcatcagcgtgcggatcggtcgctcggccagttgcagcacaccactgatcatcacgcgctcacgtcgatcaaacagcgggccttgagtggcatccggctcgccgagcaggtcagccacctcgtcacccacctcttccaacgccaggctgcgaccgccgagcaggcgcatcaccgcatgggcggtacgctcgcgcaccggcaacacgccttgcgccgacttcttgcggcgtgaacgggcgatctggttgaacacttcgatcaggatcgagaagccgatggccgcgtacaggtagcccttgggaatatggaaacccaggccttcggcagtcagggcgaaaccgatcatcatcaggaagcccaggcacaacatgatcaccgtcgggtgcgcgttgacgaagcgggtcagcggcttgctcgccacgatcatcaggccgatggacacgatcaccgcgatcatcatcaccgccagttcgtccaccatgcccacggcggtaatcaccgcatccagggagaacaccgcgtcgagcaccacgatctgcgccacgatcggccagaacatcgcataggccacattgcccgtgcgctgggccacatgcccttcgaggcgttcgtgcaattccatggtggccttgaacagcaggaacacaccaccaaacagcatgatcaagtcacggccggagaagctcttgtcgaacacctcgaacaacggctgggtaagggtcaccaaccaggaaatactcgccaacaggcccaggcgcatcagcaacgccagggacaggccgatcaaacgcgcacggtcacgctgctccggcggcaacttgtccgccaggatcgcgataaacaccaggttgtcgatgcccagcaccagttccagcacaatcaaggtcaacaggccgagccaggccgttggatccgctaaccattccatttatagagtctcttcaatcggttttcagaatgccggacacggcgaggcgcggtcggtggaccggtacagggctggcaatcggaatacggggtgcttcaacgggaacagcggcagcggatgtcttggggaaagacgactgggaggctccgagagggtgttcatgcaaatcctgcaattacaaaaggacttgaatcgtacagtcgaaaggcaaatttcccacaacccaaaactattacaagatctgtaaaacctttcacaccaattcgatcacttgatcaccaaatgaaattattatcactgcaaacacatcaaaacccatgccaaaaaccgacaaaaacagcctaaaaacctataagccagcctatttcgcagtttttcgtgaaagaatttgactgatcagaatttcatttgataaacatatgatcagtacaggcaatgaatgaacgactgactacaacaataaatggggtgctcatcatgaaacttgctacgaccttcgccgccgctgcggccctctccctcctcgccagcagcatcgccctggccgccgacggcaagacctacaaggtcggcgccgcggtctacggcctcaagggccaattcatgcagaactgggtacgcgaactcaaggagcaccccgccgttaaagacggcaccgtgcaattgaccgtattcgacggcaactacgacgcgctgacccagaacaaccagatcgaaaacatggtgacccagcactacgacgccatcctcttcgtgcccatcgacaccaaggccggcgttggcaccgtgaagcaggccatgagtaacgacgtggtggtcatcgcctccaatacgaaagttgccgatgccgccgtcccctacgtgggtaacgacgatgtggagggcggccgcctgcaggcccaggccatggtcgacaaactcaacggcaagggcaatgtggtgatcatccaggggccgatcggccagtcggcacagatcgaccgggaaaaaggcgagctggaagtgctgggcaagcacccggacatcaagatcatcgagaaaaagaccgccaactgggaccgcgcccaggccatggcactgaccgaagactggctgaacgcccaccctaaaggcatcaacggcgtcatcgcgcagaacgacgacatggccctcggcgcggtacaggccctgaaatcccacggcctgacctccaaggatgtgccggtcacctccatcgacggcatgccggatgccatccaggccgccaagaaagacgaagtcaccaccttcctgcaggacgcccaggcccagtcccagggtgcgctggacgttgccctgcgcgctttggccggcagcgactacaagccccgctcggtaatctgggaacgctacgccaaggatgtgaagtgggctgacggcaccgcgaagaactacatcctgccctgggtgccggtgaccaacgccaacgccgatgcgctgtacaagcaagtcagcggcgccaagtaagccgtcgccggttgatcgctccccgtatgggagcgatccgttcatctttgttgtgaggcctgccatgtccactgtcaccgaacgcccgcaagaacaactgcatcccgccatccccaaaaccatgcaggccgtggtctgccatggcccggaagactatcggctggaaaccgtcgacgtgcccacccccggccccgaggaaatcctcaccaaggtcgagttgtgcgggatctgcatgggcgacatcaagacctatcgcggcgcgccgtcgttctggggcgacgccgagcaaccgcgctatgtgaaaccgccgatgatccccggccatgaattcgtgtgccgcgtggtcgccctggggcctggcgcggaaaagcgcggtatgaagatcggcgaccgggtcatttccgagcagatcgtgccgtgctggggctgccgcttctgcaaccacggccagtactggatgtgccagaaacacgacctgtacggcttccagaataacgtgcagggcgccatggcccagtacatgatcttcaccaaggaaggcatcatccataaggtcccggattccatcgccccggatgaagcgatcctgatcgagcccctggcctgctcgctgcacgccgccgaacgcgccaatgtggactttgatgacgtggtagtggtcgccggtgccggcacgctgggcctgggcatcattggtgcggtgcgcatgcgcaacccaaagaaactcatcgtgctggacatgaagccggaacgcgccgccctcgccctgcgcatgggcgccgacgaggtgtggaacccggccgaagtcgacgtgctggcgaagatccgcgacatcaccgatggctacggctgcgacatctacatcgaagccaccggccatcacaaggcggtgaaccagggcctggcgatgctgcgcaagctggggcggttcgtcgagttcagcgtgttcaatgacgaggccacggtggactggtcaatcatcggcgaccgcaaggaactggatgtgctcggctcgcacctggggccttacatgtacccgcgcgccatcgactttatcggcaaccgcaagatcgacatgcgcgacgtggtcacccacaaattcgccctggcggacttcaaggaagcgtttgcggtgatggagcgcggcgacaagtccctcaaggttgtgcttgagccctgacctgctggatataccgcaccactgccggcgctttctcgaagcgccggtaaatcaacgacaaccaggacgacgcctcattgccctggatcgcgcggtacaccacccccggcaagctcacatgccccaccaccgacgtcggcaccaccgccacgccctgccccaatgacaccaacgcaacaaccgccaccaacccacccggctgcggccccaggcgcggcgcaaaaccaccttgggccgccacgtgcagcgtgccgctgatctgttccggcaggatgaaggtctcgttttgcagatgctcgcagtggatgaccttcaaacccagcagccatgaatcctgcggtaacgccagcacaaaaccgtcactgtccaggcacacggcttccacaccgtccggcaaggtcatcggcgaacggatgtagccgatgtcgtagcgcccgtccgcaacggcgcctggcagtgtggccatggcgcattcgcgcacgttcacgctgacatcgggaaacgcctggcagaacgcctgcatctgccgctgcaacacgccggaatacacggcagaagccacgtagcccaactccagatggccgatctcgccacgcccggcacgctgggcattgcgctgggcaaactcgaactgacgcaccgtcgcctccgcttcgatcagcagcgtggcgccggcctcggtcaggctgacttcgcgctgctggcggacaaacaggcgcgtgcccaggctggtttccatgtcctggatctgtcggctcaaagtggggggtgcgatccccaactgctcggcagcgcgggtgaagttgcgctgacgggcgacggccaggaagtagcgaaaatgacggatttccatttcagcattagctcaaaggtaatgaaatgagtcagcctggctaataaaggcgctgggcagcgcggatatgctgaggcaaaccagaacagtagagagcccttgcgatgtccgtcaactgcattccgcctattgcctttgaggtaattcaaccatgagccgggtcagcccacgcctgaccctgctgaccgcgtccggcgtctgctcgctgatcgtgctcgacaccaatatcgtcgccgtgaccctgccgagcattgcccgcgacctcggggcgaacttcgccgatatcgaatgggtggtcagtgcctacatgctggcgtttgccgcgttattgctaccggccggcagcattgccgaccggttcgggcgcaagaaaaccctgatctgggggctgagtattttcatcctggcgtcattgggttgcggggccgcgcccactgcgctgctcctcgatatcgcccgcgcggtcaaaggcgtgggcgcggcgctgttgctcacgtccgccctcgcctccatcggccataccttccacgacgaggtggagcgcgccaaggcctgggccttctggggcgcgtgcatgggcgtggcgatgactgccgccccgaccctcggcggcctgatcacccagtacctgggctggcgctggatcttctacctcaacttgccggtagggctggtgctgatgagcctggtcttgcgcgcgattccggaatcccgcgacacccaatccgcaaggctcgacccctggggcagcctggcattcagcgccagcctgctgtgcctgatctgggggctgatcgaagccaatcgcatcggctgggacaacccgttgacctacgcccgcctgatcggcggcgcggtcttgctgggcgtatttgtgctcgtcgaacgggtgcaacggcggcccatggtcgacctgcaactgttccgccacccgcgctttatcggggcgttgctgggaatgtttgcctatgccggctgtgcccaggtgatgatgacgttgttgccgttttacctgcagaacggcctggggttttccgcgatcgcctcgggcctgggcatgctgccgtttgcgctgaccatgctgatttgcccgcgcatcggcgcacgcctggccgcacgctttgcacccgcgacaatgatggccgccgggttgacgctggtgggcagcggtaacctcttgagtgcctgggcagtgaacgccggcggctacctgcccttcgccctggcgattgccgtcaccggcgccggtgccggcttgctcaatggcgatacgcagaaaaacatcatggcctgcgtgccacgggaccgcgcggggatggcgtcgggcatgagcacgaccatgcgcttcagcgcgatcatgctggcgattggggtgtatggggcgttgttgagcagtcatagcgagcagctgttgagcgccaccatcggcgcgcaatggcaggcgcaggtgaacgggattgcttcacgcgtagtggccggggatatgccggcggcgatgggcttgttgccggaatcggcacgggcggtgatacagccgctggcacggcaggcgtttgtgggtgggttcagcggggtgttatgggtgtcggggttgttggggttgcttggagcgttggtggtggggatgttgatgaggaaccccattccagcggtgcaacaggcctcaataaaacctgcgcaccgctgatcagccttaccagaaccgctgctgggtcaaccggctccaccaggtcagcagcacccggtccaccgagccgctggccgccaggcccacgcgctcctgcaggctcttgcgctcggcatagtgcaagtggaacacctcggcggtcttggccttggtggccaggtattcgtcgctggtttgcagctcatcgaccagttgcttgtcgagggctgcaacacccagccacacttctccggtggcgacgtcatcgattgccaactgcgggcgataacgcgacacgaagttcttgaacaactggtgagtgatgtccaggtcttcctggaacttctcgcggcccttctcggtgttttcgccaaacacggtgagcgtgcgcttgtactcgccggcggtcagcacttcgaagtcgatgtcgtgctttttcagcaggcggttgacgttaggcaactgcgccaccaccccaatggagccgaggatggcgaacggcgcgctgatgatcttctcgccgatgcacgccatcatgtagccgccgctggccgcgaccttgtcgatgcacacggtcaacggcacgcccgcctggcggatacgcgccagttgcgacgaggccaggccgtagctgtggaccatgccgccgccgctttcgaggcgcagcaccacttcgtctttcggggtagccaggctcagcaatgcagtgatttcgtggcgcaggctttcggtggccgaggccttgatgtcaccgtcgaagtccagcacgaacacccgtggcttggcctcggccttctgcttgcccttcttcttttcggccttgccttcggacttgcgcaaggccttgagctggtccttgtcgagcagggtcgactccaggcgctcacgcaggcctttgtagaaatcattgagcttgctgacctgcagctggccggcggatttgcgacgccctttactgcgcagcgccgcgaagctgatcaataccaccagaatagcgaccaccagggtgacggtcttcgccagaaagctcgcatattcggccaaaaaatccatgttgctccttacaagtgcagtgcgccgggcgcggattgccccagcataccggcggcaccgcgttcgagccagtgatcaaaccgccagcaacgacaggctccaacgagcttttaaaacaagcgtatgttttttcattgacagctcgcaggcatcctcataacctcgccagactttcaacgtaccgggaaaacggacgtgggcagcatctatctgattcgacatggccaggcctccttcggtgcagacgactatgacgtgctgtcgcccgtcggcgtggagcaggcacaagtgctcggtcgccacctggcggacatgggcctggtgttcgaccgctgcgtggccggcgacctgcgccgccagcagcacaccgccaccgccgccttcgagcagtaccacgccctcgacttgccggtgccggcgctggaaaccgacagcgcgttcaacgaattcgatgccgacgcgatcatccgcgccctgctccccgacctgctcaccaccgaacccgaagccctggagatcctgcgcaatgccgcgcagaaccgcagcgagttccagcgcatcttcgccctgatcatcgagcgctggctggccggcacctatgaccctccggggctcgaaagctggctgggcttcgtggaacgtgtgcaaggcggcctgcaacgcatccttgaagcggcggacaacacccagaagatcgcggtgttcacctccggcggcaccatcaccgccctgctccacctgatcacccggatgcccgccgcgcaggcgttcgaactgaactggcaaattgttaacacctcgctcaaccagctgaaattccgcgggcgcgaggtggcactggcttccttcaacagccatacccacttgcaactgttgaaggcgccgcagctcatcaccttccgatgaactgcggccaaccgtgaccccaaggtcactggactctacccaaaaggatcgaaaccatgactgacgtagccaaagctgtagaagcaatgaaagccaaattcaacccaagtgctgccgaaggcttggacctggtattcggtttccgtatcgatgacaccaagaacttctccctggtcgtcaaagacaagacctgtgaactgcaggaaggcgaaaacccggacgcccaggtgaccctggtcatggacagcgaaaccctggaaggtattgtcgacggctccaccgacggcatgcaggccttcatgggcggcaagctgcgcaccgaaggcgacatgatgctggccatgaagctgagcgagctgttcccttcctgattcacgggcgaccctgaatcccgatcccgccttcacaggcgggatttttatttgggctgcagcaacaacgccaccaacgcactccacccggtttgatgcgaagcccccagcccccgcccggtctcgccatgaaagtactcatggaacagcaccagctcacggttctgcgggtccgcctccaactgcgcatactccaccatcgacggccgcgagccgttttcatccctcaggaacaaccgcgtcaggcgctggctcaggctgtcggccacttcctccagggacgccagataaccgctgcccgccgggtactccaccgagaagttgtcagcgtagtagcggtgaaattcgcgcagcgactcgatcaacatgtagttcaccggcatccacaacggcccgcgccagttggagttgccaccgtacagccgcgagtcggattcacccggctggtaacgcgcactgagggtgttgccattcatcttcaacgccagcggttgctcggcgaatgccttggacaaggagcgcacaccaaacgtcgacaggaactcatgttcatcgagcatgcgccgcaacaggtctttggtccgctcaccgcgcagcagcgccagcaacaggcgattgccctgccccggttcgttccagcgtgaaaccagcttggccaggtccggccgatgtttcatgaaccccagcagacgctcgcgcaagccctccaggccctcatgttcgtgctgctccagtaccagcacggcaaacagcggcatcaggccaaccatcgaacgcaggcgcaccggctcgttctggccatcggggcggtgcagtacgtcgtagaagaacaggtcctgctcatcccacaggccttcggcgctgtcgtcgacacggttgatggcgccggcgatgtacaggaagtgctcgaagaacttcaccgagatgtcgacatacaccgcattgcgcttggccagctccaggccgatgcgcatcaggtccagcgcataggccgcgacccatgccgtaccgtcggcctgatccagctgataccccggcggcagtgcagcggagcggtcgaacaaggcgatattgtccagccccaggaaaccaccctggaacaggttgcgcccctcggcgtccttgcggttgacccaccaggaaaaattcagcagcagcttgtggaaaatccgctcgaggaaatccatatcgcctacgccgttgagcgccttgtcctgctgatacacccgccaactggcccaggcatgcaccggcgggttggcatcgtcaaaccgccattcgtaggccggcaattggccgttggggtgcatgaagcggtccttcaccagcagcaacagctgttgcttggcataccccggatcgatcagcgccatggccaccgcctggaagccctggtcccacgaggcataccacgggtattcccacgtgtcgggcatcgagagaatgtcgaagttggacaggtggcgccaatgggtattgcggatatgcaggcgctcggggggcggcgcgggttgtgcggggtcgccgtcgagccattggttgacgtcgaaatagtacagctgcttggaccacagcaacccggccagtgcctgacgctgcacattgcgcgcatcgtcgtcggccatgccacgttgcagggcggcgtagaagtcatccgcttcctggcggcgttgttcgaacagcttgcgcgcgttgacctgtggcgcgtcgacaggagcaaagcgcaggtagagacttttgctttccaggccggccagttcgacgatgaaacgcgccgcgactttggtgccgctgtcacgccgaattgccgattgaacaccctcgaccacgaaatcgttgatcccgtccttgaacggccccggtgcaggctgcccatccagcctggggtagttggtttcgttctcgcagaacagccactccagcccgtcctggccccaggcgctgagatgacggtccggcagttccggatggcgtgccagcacctgcgccccgtccaacaccagctgcggcttggtcgcgtcaaaggtccagctccagtcattgcgcgcccacagttgcggcaacacctgcagccgcgtcggctggtccgagcggttgtgcacggtgacgcgcatgaagatatcgtcgggttggtgcttggcgtattcgacgctgacatcgcagtagcggttgtcttcgaacacgccggtgtcgaggatctcgtactcggcatcggccaggccacgccgtgcgttttcgctgatcaggtcggcgtagggaaaggcgacatgggggtatttgtagagcatgcgcatgtaggcatggctcggtacgccgtcgacgaaaaagtacagttccttgacgtcttcaccgtgattgccctcggcgttgtcgaggccgaacaggcgctccttgaggatcgcgtcgcgctcgttccacagggccaggcccaggcaccagcgttgcgccttgtcgctgaaaccggccaggccatcctcgccccagcggtaggcgcggctgcgtgcatgttcatgggggaaataggcccaggcgtcgccgtcggcgctgtagtcttcgcgcaccgtgccccattggcgttcgctcagataggggccccactcgcgccaacgctcggcatcctgctgcgccaggcgctggccttcggttgtatcaagcattcgggtgtcgggtgtggccgtcatcgggtcctccatcgcctaccaggtgagaggcagtgtagagcccaatgacgcccgggtgcacatgaagacttagaagatggcgtaggtgtagttgaagatcaggcgggtctggtcctggtcggcagtaccggtgttcttgccgtgataggtgccggtacggaacgtggtaccgaagcctttcaggggacctgcctgcaccacgtagtccaggcggaagtcggcttcgttctctttctggtccgggccaccggcgaccttcgacttgatgtccgaaccgtccaggtaggccacggatgccttcagcccaggcacgtaggccttgaagtcataggtgtactggccaaagttgacctgctcgccggcacgggagaactggccgaccacggcgtcggtgaacagatagaagtcgctgccgccagcgccttgggcgtgcgggtcggcgaggctgccctggttgacccagacgaaaccgccatcgtcacccacgccaatgtggccgagcatcaagctgctgccgcccagttggtaggtgaaggccgcactgtaggttttgttgtcgacttcgccggcgtgtttggcgtagccaccgttgttgttgaattggtagccgctctcgccgttcttgccgtcgctgcggctgtcgaagtagcgcaggtcggtcttgaacgactggtcattgcccagcggcagggtatggaccaggccgacgtagttctgtttgtagaagtcttgcagttgggcgtagtagtactgcaacgtcaggtttttcgcgatcacgttgtcggaagacccaaacggcttgtagtccacgccgccgaacttgaagctgtcgctgtcgcgagtaccaccggccacgctcaggcctgtggagttgctggaggcacggccttcaacgcggttcagctcaccaccggtgaaggtgacgttgggaatgtcgttggaggtcaggatgccgccatcaaaggtctgcggtgctacgcggctgtcgttggacaccaggatcggcaggaccggcgccaggccaccaccgacgtgcaactcggtctgggaaatacggaacttcacattgccagcggcgcgcccgaaggaatcggccggttcagtgccgttgttcttggtcgggaagaaactattgccgttacccgccaggcccgcgcccgccgtgtggccgtcgccaccgtccaggcgcagcgcgccgaaggccatgacgtcaaaacccaggccaacggtgccctgggtaaaaccggatttgtagtcaaaccgcagcgctgtggcggtttcgcgcaaatcgttgttggtccccgagcggttgtccgcgctgtagtacatggtccgcgaactgacggacgcatggctgtcttcaaggaagccgctgtgaccgttgccagtgcccagcgagccgagcccgaaatcatcggcgtaagcctgttgtgcaagaacggcggcggtgatcgacaacgccagtgtagaaattttcattaacgacggcccctaaacatatttttatgtgtgcgatgtgcgtaacggcgttttcatccttgcaaacgtgacgattctttcacgccggccggggcggacttcgtgaagaattagttaggaaaatcgcccgaaaatgaaatttcacgcgggctgatttttgtcatcttcacgtcatctcattcatttgcagaatgaagtcctgaggaatcttcgtttgcaaggcgacgttgcgctcaacaaaatccagcaaaaggccaccatcctcgcccccgccatcaggaatttttctatgcccagcaccgcacaggtcagccccgacgagatccgcaagggcttttccaaggccatgtccgacatgtaccgagatgaagttccgttgtatggcgcgctgatggagctggtggccgaaaccaatgcccacgtgctcgacacccaaccgcaactggcgcaacagctgcaacgcaccggcgaaatccagcgcctggacagggaacgccacggcgcgatccgcctgggcaccgccaccgagctggccaccatccgccgcctgttcgcggtgatgggcatgcagccggtgggctactacgacctgaccccggccggcgtgcccgtgcactccaccgcgtttcgcgccgtgcatgaacaggcgctgcagaccagcccgtttcgcgtgttcacctcattgctgcgcccggagctgatcgaaaaccccgacctgcgcgccttcgccgagacggccctggccaagcgctcgatctttacccccggcgccctggcgctgattgaacaagccgaaaaacatggcggcctcaacgcccaggatgccgacgagttcatccgccaggccctggaaaccttccgctggcatcacaccgccaccgtcaccgccgcccagtaccagcaactgagcgaccagcaccgcctgatcgccgacgtggtcgccttcaaagggccgcacatcaaccacctgaccccgcgcaccctggacatcgaccaggtccaggccgccatgcccggcaaaggcatcacgcccaaggccgtgatcgaaggcccaccgcgccgccactgcccgatcctgctgcgccagaccagcttcaaggccctggatgaacccatcgccttcaccgacgcccaaggcagccacagcgcacgcttcggcgaaatcgaacaacgcggcgtggcgttgacgcccaaaggccgcgcgctctacgaccaactgctgaacgccgcccgtgacgcactcggcgccttccccaacgagggcaacgctgcgcgctatgtcgaattgatggaggaacacttccaggccttcccggacaaccacgcccaaatgcgtgaccagggcctggcctactaccgctacttccccacccagcaaggcttggcggcacgcggcagcgccgatcaaccacgcaccctggaggcactgatcgccgccggccacatcgacgtggaaccgttggtgtatgaagattttctgccggtaagcgcggcggggattttccagtcgaacctgggggatacggcgcagagtcactacgcagccaactcgaaccaggccgagttcgaacaggcactgggccagcgaacgattgatgaattgaaactgtatggcgagacgcagcagcgctccatcgatgaatgcaccgaggcgctgctggcatgaaatgaagtacccacccggctcaccagcgcaatccttgcgccgcaacagtccccagagccgggtgggcggtgggcatcataggcagtgagtgggatgatgtctttcagtcaattctgaaaaaatgtgaacggggcgaacgtgcctgttcactgcgcaataaaacaacgatgctgcagtaggttcccctgcgtgcggcagctatgaccaagccttcattttcctatctatgggcggcgtccagcggagaatcccgtattcccaggcagccttattcaatgcgtttctgcccctcacatagcttgtgattgccgtgtccgtgtacaagcaaccgatcttgatgaatgtgttgcccctgcactcattcgtcgtgagcgtgctgatagcactcatgatctatgaactggcgactcaaaaaaatagtcgcaaggtaacgtgtgtactctcaacctccagacgtaagcccaactgtgcttatcacgcgtgcaatacaaaaatacactgcaaagaacaacccacattaaacccaacagaaaaatactacacgcatttaggaagtcctacatttgctcaatgctggcaacatggcttttactgagtgccattcaggaacgatcagcctccttcccgcccccccaaaacagacactcaacaagcatgcttaaacctatcaaaaacaagaacgacaacttatattacgctttgtctgtcttcatgaatctggacgtccagagaagcttatttgtactttacctactgcaactcggcatcacccagggagaggtaggcattctacagtcgttcttgtttttttcttcagtcgcgctggaaatcccctctggtttactcgcagatcgatatggtcgcaagtgcacgcttatcatcagctttttaggcttgtgtataagtggaattggatttttgctattttcatcttttgttcccttcgcaatcatattctgcctattcggtgccagcattgccatggggtctggttcagacagagcattactgtatgacaacttactggcagaacatcgggctgatgagtaccctaaaatattgtcacgcgcccgtgctattggtgcgatatcgctgagtttgtccatgcttcttggcggtgtcatacaagacaccttgtcgtggaacggagtctatattttttttgcggcatcaaaactcatcggcgcgatcattgtagtattcaactccgaaatcaagcttccacctatttcactaaaccccaacaacgcaaatgaattaaatacgacaaccgcagagggaagctttactttactcatcaaatttttcagctccaacagaggtgcttttctgatacctctctttgttggatatgctctatttgaactctcaaccattcctcttttcatctacggccagccattcttctcccagcagggtctagaaatacctattattgccggcatttacgccacagttgaaatcatatcggctgccatgtttatggttgcaggatatatttgctccagattcacgcttggggtgatagccgtcaccaccaccctcattgtcaccgcactgctcttcaccctatctttgaataccggaacactctcttcagtcgcagtatttattttaatcatgtcactccccgctatctatgaaactgcctacgagacctacatcaatgaaaacatagagtcacgcattcgagcctcctgcctctccgtcgccaatctagtcaattcgatcatcatcggtatctcctacactgtcttcggcgggctgctggatagatatggtttctcgtcgacgttgattgttgttgcaggcgtctgttttatgggtctcttttttgcaagtactaccttactgataagtgggcaacaacgtcgtaaaaagagcaaaaagcttgaatcaatccggtttactgaagatgcgccgtgacaggcccaaagtcgggtggataaatatgtcgataaacctgtaggagcaagcttgctcgcgaagaacccgagaacgccgcgtccactcagggcgccggcgtcatcgttggcgtttttcgcgagcaagctcgctcctacaggaggctcggttgtgatcagcccaacttcgccacgatgtcgtctttgatcaacaagcgtttcttcttcagcttctccacatcctcatcgctggcacttgccgattccgctttcagcaccgccttgtcagcgtcgtcgtactgcgtgagcagcgagtccaggcgtttgtcgctcgccctgcgttcgtgaatgacttccttgctcaccttcaagtcctgatacaagtcgtgtttcactggcatggcgtacctccgcatgttgatcaatggcttacgccctagaagctagaccattgcgaggggtcttgtcatgcgcggggtcaatacagccccgttcgtcgcggcgcgggtgtttggatcaaacctttgcggcgtcctgccctccactctagatagccacccgagggagaccggtttcatgacgcacgctgccaccgctgtcgacacccaatgcatcaacacgatccgcaccctggccatggatgccgtgcagaaggccaattccggccatccgggcacgcccatgggcctggcgccggtgggttataccctgtggagtcgcttcctgcgttaccacccgcagcatccggactggcccaaccgtgaccgctttgtgctgtcggtggggcacgcatcgatgctgctgtattcgctattgcacctggccggtgtggtggagatcgatgccgatggcaagcgcaccggccaggccgccgtcagcctggacgatatccagcagtttcgccaagcgggctccaaaacccccggccaccccgaataccgcatgaccactggggtggagaccaccaccggcccgctgggtcagggttgcgccaacagcgtcggcatggcgatggctgagcgctggctggccaagcgcttcaatcgtgaaggaaacaccctgttcgattacaacgtctacaccctgtgcggcgacggcgacatgatggagggcatcagcagcgaagcggcgtcgatggccgggcatctgaagttgtcgaacctgtgctggatctacgacaacaacaccatcagcatcgaggggcacaccgagctggcgttcagcgaggacgtgatcaagcgcttccaggcctacggctggcacaccttgcacgtgaccgacgccaacgatttgcaggccctgggcacggcgctggaaaccttccacagcaacaccggcgcgccgaccctgattgtggtcgacagcgtgatcggctacggttcgccgcacaaacacaacaccgttgccgcccatggcgagccactgggcgacgaagaaatccgcttgaccaaggcggcctacggctggccgcaggactcgagtttcctggtgcccgacgaagcccgcaatgtgttgcgcgatgcactgctggaacgcagccaacccttgtacgacgcctggaaccagcgcctgtcgcagcttgagcaatacgaaccggaacgggctgacgaactgcgccggatgcgcgccggagaaatgcccgagcactggcaggacgatttgcccgacttcaaccccgacgccaagggcgtggccagccgcgccgccggaggtgaagtgctgaatgcctttgcccgacaaatcccctggctgctgggcggctcggccgacctgtcaccgtcgaccaagaccaacctcacctttgacggtgccgggcgtttcagtgccgacgactacagcgggcgcaacctgcacttcggcattcgtgaacatgccatgggcgccatcgccaatggcatggcgctctcctacctgcggccgtacacctcgaccttcctggtgttcagcgactacatgaagccgccgatccgcctggcggcaatcatggagctcccggtggtctttgtgtttacccatgactcgattggcgtgggtgaagatgggccgacccaccagccgatcgagcacctgacccagttgcgcgcaacgccggggctgctgaccttgcgccccggtgacgcgaatgaaacccgcgaactgtggaaggtggcgctggcacagacccatcggccgagctgcgtggtgctgtcgcgccaaccgctgccgacgctggatcgtacgcagtacgcgccggcatccggggccgccaggggcgcttacgtgctggcaagtgcgggtgcgccccaggtgattctgctggccacaggcagcgaagtcagcctggcggtggcggcgtacgagcagttgaaagaagaagggattgccgcgcaggtggtgtccatgcccagttgggagttgtttgaggaccaggaccagacgtaccgcgacagcgtgttgccgccggcggtgaaagctcgggtcgtcgtggagcaggcaggccccctcggctgggaccggtatgtggggcagaccggcgccaaggtggtgatgaacagctttggtgcgtcggcgccgttggcacagttgcaggagaggttcgggtttaccgtggagaatgtggtgaagcaggcgaaagcgcagatccaactgactcaacagtgatcgaaatgtgggaggggcggtgcgacggttccacttgcccccgatagcggtgtgtcagtcgcatatcagttgactgacacactgtcatcgggggcaagccccctcccacaagttctcatccgcttttagttcagttctttggccaggaatggcgcagtccggctagtcttgcttttggcaaccttctgcggcgtcccactggccaccaccttccctcccagatcccccgcccccggcccgatatcgatcacccagtcactctgcgccaccacgcgcatttcatgctccaccacgaccaccgtatgccccgcgtccaccagttggttcaactggctgagcaggcggtccacatcccgtggatgcagcccggtggtgggttcgtccagcacatacagggtggcgccccgcgcattgcgttgcagctcggtcgccagtttgatgcgctgtgcttcgccaccggacaactcggtcgccggttgccccaggcgcaggtagcccaggccgatatcccgcagcacctgcagcgaacgcaacaccccaggctgttcggcaaacacctccaccgcctgctccaccgtcagccccagcacctcggcgatgctcaagccttgccatttgatcgccagggtctcggggttgtagcgcgcgccgtggcagatcgggcatggcgcgtacacgctgggcatgaacagcaattcaacgctgacaaagccctcgccttcacaattcgggcaacggcccttggcgacgttgaaggagaactgcccggcatcgtagtgacgcttcttcgccgccggggtggccgcgaacagcttgcgcacgttgtcgaacagcccggtgtaggtcgccaggttggagcgcggggtgcggccgatgggtttctggtcgacctgcaccaggcggcggatgtgctccagcccggcgcggatgtggcccccgctggtttgcggggcgtcgtcttccaggcttggttcttcgtcgttttccatcacacgcccaaggccggcgcccaccagctccagcagtgcctggctgaccaggctggacttgcccgagccagaaatcccggtgaccgccgtgaagcagcccaatgggaaatccacgtcaaggcccttgagattattgcgcgtcacaccttccagttgcagccagccggtggcttcacggcgcacctgagtcgacacgcgcttttccgcgaacaggtactcacgggtctgcgacgccgccacctgcgccagccccgccggcgggccgctgtacagcacctgcccaccctgttcaccggccgccgggccgacgtcgatcagccagtcggcgcggcgcatggtttccaggtcatgctccaccacaaacaatgaattgccggccgccttcaagcggtcgagggcagtgaacaacgcttcgccgtccgccgggtgcaggcccgccgagggctcgtccagcacgtagatcacaccaaacaactgcgagcccaattgcgttgccaggcgcagtcgctgcaactcgccggaggacaaggtcggcgtgctgcgctccagggacaggtagcccaggcccaattcggtcaaggtactgacccgctccagcaagtcctgggcgatgcgctgcgcggccaggcgcttctccaccgacagcttcatcttgtcctgccccgccgccaccgggcgcagcaactcggccaactgcgtcaacgacagttgcgacaactcaccgatgtccaccccggcaaacttcaccgacagcgccgcctgggtcaggcgcttgccgtcgcacagcgggcaggcgctgccctgcatgaactgcgacacgcgctttttcatcagcgcactctgggtatgggtgaacgtgtgcaggatgtagcgccgtgcgccgatgaaggtgccctggtagctcggctccagtttgcgcttcaacgcatcgcgggtctgttccggggtgaagccggcgtacaccgggacggtgggggtctcttcggtaaacaggatccagtcgcgctgctttttcggcaggtcgcgccaggggatgtccacgtcatagcccagggtcaccaggatgtcgcgctggttctgcccctgccacgccaacggccaggacgccaccgcacgctggcgaatggtcagggaaggatcgggcaccatcagcgcctcggtcacttcatacacacgccccaggccatggcactgcgggcacgcgccctggggcaggttcggcgaaaagtcttcggcgtacagcatcgcctgccccttcggataactgccggcgcgggagtacagcatgcggatcaaactcgacaacgtggtcacgctgcccaccgacgagcgcgcactcggcgtgccgcgctgctgttgcagggccacggcgggcggcaggccttcgatgctgtccacgtccggcacgccgacctggtcgatcaaccgccgcgcatagggcgccaccgactcgaaatagcggcgctgggcctcggcatacaccgtggaaaacgccagggacgatttgccggaacccgacaccccggtgaacaccaccagggcatcgcggggaatatccacgtcgacgttgcgcaggttgtgttcgcgggcgccgcgcacgcggacaaagccggcgggttgggcagtgatcggaggaatattgcgctgtgaagtcatggacaaccttgtcgggcggtgagcacgctgcgcacccgttgcgtcagcgcttcggggctgtagggtttgctcagcagatgaatatcggggctcagcaagtgattgctggagagaatgtcacgggtgtggccggacgtgaacagcaccggcaccgcaggcgtctgctggcgggcccagtcggccaggtcggtgcttttgacgcggccgggcatgaccacatcggtgaagatcaggtccggtggcgagcctgcctgcagtttcgacatggcctggtcaccgtcttcggcggtaagtacggtgtagccggactgttcgagcagctccacgacagtcaggcgcacaccttcattgtcctcgaccaccaggatggtttcctgtccgccgctgtgctgcacctggtccatatgcacatcgaggctttccggttccaggctgtgggggaaatacatctgcaccaccgagcccttgccctcctcgctccacatttccacatgcccgccactctggcgcacaaagccgaacaccatgctcaggcccaggccggtgccatggccttcacgcttggtggtgaagaagggttcgaaggcgcgcttgagggtggtctcggacatgccgacgccggtatcggccacctccaggcgcacatactcgccgggcttgatgcttttgcccgcgcaatcgtccgggttgaggatgatgttttcgccggagatgcggatcaccccctcgcccttcatggcgtcgcgggcattgatcgccaggttgagcagcgcgttttccagctggttgcggtcgacgttgataaaccaggcatcctggggcatctgcacatcaatgtggatggtctcgcccagcgcccgttgcagcaactcgccaagcccggcgtaaatgcgttgcgggttatacaccgccggcgacagcggttgacgccgggcgaacgccagcagttgcgacgacagcttggccccacgctccaccgccgcaatggcggcggtgacacgccgctgcacctgggcgttgttcggttcctggcgggccagcaggtgcaggttgccggcgatcacttgcagcaggttattgaagtcgtgggccacgccgccggtgaggccgccgatggcttcgagtttctgcgactggcgcaactggtcctcggccgcagagcgcgcctgcacttcggcggccacccgttgttcgaggttgtgcgtgagttcccggcgtacttgttcggatttcaccagctcggtggtctccaccacaatcgccagcacgccggccggttgttgatcgtcgccggccaccgggctgtagtagaggtccagccacacggtttccggctggccgttgcgcaacagcaccaggtccttgttattgaatgacagggtgccgccggccaggcaggtgtccatcacatgccggttgaactcggccacttccggccaacccaactccaccggcgtgcccagcaggtacggatggcgcccgccggcaaatgccgagtagctgtcgttatagatcatgtacccccattgtccccagagcatcaccatgggcacgggtgaagccagcatcatctgcacggtacacgccaggctggtggaccagcggtcgatggggccaaggtcggtgctcgaccaatcgaatgcgcggatccgctgggccatttcaccggcccagccttcacagccgtgagggttggataagaattgcatggttggctctgtgcgcaaaaagagaacgtcggcaagttttggagcgctgtagacccggatgggttcaacccatctgcatcagaggtcattacagcagaaaccacgggggctcagtgaaaatcccgactgcgcacattgatcccttccagcaacggcgtcaggtcggtcaggcgcccggcgatcaagtgccgcacctcgcccaccgcttcccagcgcccgtccaccttcaatagccgcgaacccaccagggcctggcgttgacgctcggccaggtcgcgccagaccaccacattaaggttgccgaattcatcttccagggtgacaaaggtcaccccactggccgtgcccgggcgctgccgaccggttaccagccctgcaacgctgacattgcgtccatgttccaccgccatcagttcatgggagctgcggcagcggcgcttgcgcaattcatcccgcagcaacgccagggggtgcggcccaagggtcgtgcccacggtggcatagtcggcctgcaggtcctcgcccacgctcggtgccggcaactcgaccagcgcttcatccgggctcggcaggccggcaaacagccccagttgcttgtgcaccccggccaccgcccagcgcgccgtgtgccggttgtcggccagggcgcgcaaggccccggcatccgcgagcaaggcctgggcacgcgcatccagcccggcgcgctcgtcgaggtcggcaatgttgctgaacgctcgacgcaggcgcgcggcttcgatgcgccgcccatcttcttcgcgaaacccggagatcatgcgcaagcccatgcgaatcgccggttgtgcaccatcgatgggctccaggctgcaatcccaatcgctggcctgcacatccaccggccggatctgcaagcgatggcgccgtgcatcctgcaggatctggtccgggctgtagaagcccatgggccaactgttgatcagcgcacaggcaaacgccgccggttcatggcacttgagccagcaactggcgtaggtcagcaaggcgaaactggccgcgtgggactcggggaagccatagctgccaaagcctttgatctgctcgaagatctgcgcggcaaaggcttcggtgtaaccgtttttcagcatgccggtgcgcaggcgctgctggtgcggctccaggccgccgtggcgtttccaggcggccatggagcggcgcaactggtcggcctcgccggggctgtagtcggcggcgaccatggcgatctgcatcacttgctcttggaacagcggaatgcccagggtgcgttccagaacggttttaagctccggcgaaggataggtttcgggttcttccttgttccgccgccgcaggtacgggtgcaccatgccgccctggatcggccccggtcgcacgatggccacctcgatcaccaggtcatagaatttctgcggcctgagccttggcaacatcgacatctgcgcccgcgattcgatctggaacacgccgatggtgtcggccttgctgatcatcgcgtaggtggccgggtcttccttggggatcgtcgccaaggccaggtcgcggttgcggtggcggcgcagtaagtcgaagcaacgccggattgcactgagcatgcccaaggccaggatatccaccttgagcaagcccacggcgtcgaggtcgtccttgtcccactggatgatggtgcgctcggccatggcggcgttttccaccggcaccagggtgtccagcgggtattcggaaatcacgaagccgccagggtgctgggacaggtgccgagggaagccgatcaattgctgggtgagcgtgagcacccggcgcaacagcgggctgtcgggatcgaagccgccttcgcgcaggcgctccagcggcggggcatcgtcgctccaacgcccgcagcagtcggccagggcgttgatctggtccggcggcagcccgagggccttggccacatcgcgtaccgcgccggcggcgtggtaactgctgaccaccgccgtcagcgccgcgcgggtgcggccgtagcgctggaacacgtactgcagcacttcttcgcggcgctcatgttcgaagtccacgtcgatgtccggcggctcgttgcgctccctggacaggaagcgctcgaacaacaggctcgtcaggctcgggtcgatctcggtgatacccaaggcaaagcacaccgccgagttggccgccgaaccgcggccctggcacaggatcgaacggctgcgggcgaactgcacaatgtcatgcaccgtaaggaagtagctttcgtagcccagctcgctgatgagcttcagttcggtgttgatctgctgcaaggtcttggcgtcgacaccctgcggccagcgttgggcgatgcccgcttcggtcacggtgcgaagccaggattcggcgtcgtggccgctgggcaccagctcacgcgggtagtgatagcgcaactggctgaggtcgaaggtgcaacgccgggcaatcgcctgggtttcatcgagcaaggcgtgcgggtacagcgcggccagggcatcaaggctgcgcaggtgccgctcgccattggggtgcaggcgcgtgccggcttcggccaccggcacgtgatgacggatagcggtcatggtgtcttgcaaggcacggcggccacgcgcatgcatgtgcacatcgccacaggccaccgccgggatgtgcaggctggcggccaggctcaagcgttgttccaggtgacgcgcatcgtcctggccgcagtgcaggtgcacggccagccacaggcgcccggcgaaggtgcggcgcagccactggatcgaggcctgggtgtcgccgtcctcggcgacccacagtgccagcaggccgggcagcggttgttcgaagtcctcgcgcaacaggcgatagtggcccttttccgcgcgccgccgggccacggtgatcaagcggcacaggtgctggtagccgctgaggtcttccaccagcagcaccagcttcgggccgttctcgatgcgcacctcgctgccgataatcagcggcagttccaccgccttcgccgcctgccaagcccgcacgatgcccgccagggtgcattcgtcagtgatcgccagggcgctgtagccttggcgcttggcccgctcgaacagctccagcgcactcgacgcaccgcgctggaagctgaagttggacaggcagtgcagctcggcgtaattcatgcaaaccagccttgcagccacaacccatcgctttgcccgacgttacgaaaggcccagccttgctggccggcgcgggtctggatcaggtagtagtcgcggcggatatcggcgccgtcccaccagccggactcgatgcgctccggccccatgaggatgtgcacaccgtgctcggccaagagggtgggttcgctcagcaaccaaccggggcgttgcaccttgtgcaaggtcgggcatgggcttttatcggtcgctgtttgccaggcgcattcggggcggtggtcggcgtggaagcgcaagccctgcacggcctcatcgcccaggcgtgcacgcaggcgttcgcgcaactgttcccacggcaaggtctgttgcgggcggtcgtcgaacaggtcctggcgctgcggcacgaacaccggcaaatcctgggcgaccaggcgaaagccgcgtaccggtgaggtgacctgtacctgctccaggcgaccccgggccaattcaaacagcatcgccggttcacgctcggcgctgagcaggccgaccttgatcagcgtgtccggcgcctgggcgtgttccaggtgcaagtcaaaacgctgtacgccactgtcacggccacacaggaaggccgacagatcgcccgtcaggcgtcgcaaaggaaacagcagcgcctgatgggactgcacgtcgaaattcagctcgatgcgcacatcgaaccggtccggaggctgatagaacgccaaggccaatgggcgctggccggtcaacgcatccaagtgcttgagcaggccggcatcaaaacgtcgcgccaaggtgtgccgaggcagcgcctgcacctgggccaggcggcgcaggcccatgcgcgacaacgctgtggcggcctgcgggtcgaggccggcgcggtcgatgggcagcggcgccagggcctgcagcaagccgtcatcctgcaccgccaaaccatcgtagatattcgccagcacccgcgccgccgccgggttgggcgccgcgacgatacggtgacgaaagcccaattcggtcagctccttgcgcaagcgtgcttcaaaccgcggccacggcccgaacaagcccaggctcgattcgatttcaaacaacaaggcacgcgggtaatacaggctgacctgggaactgaactggtaggcccaggcagccaggaactgttggtggcgctcgatctcggcggggtcgtattcgacgctggcaaaggtcttggccagggcatgcgccgccgtcagggattggcccgggcgcaggcccagggcgtgggcggcgtcattgacggtttgcagcacacgccgctgtggcgtgccggccagcagggccaggggttgctccggctcgggatgcacacgcagcactccgtccagcgccaattgcgggaagacaatacacacccagcgcatgacaacctcagtgccccgccagggcaatcggcgccggatgggccaagccgccccggcacttgagcacccgtacctgcgcgggcctggcctcgacggccaggcgtagcgcggcgggcgatgagttgaccgactcactcaaggcgcgccaggcaaacgccagggtctgcccggtttccgccgccacttgcaggcgccgcagcgcccggtcatcggccttgcgcggccagcacagcaccgcgccgcaactgccggaacgcaggcattgctccaccgcccacagggcgtcgcgttcctcggcctggatcaccgagagcaggcgcaggtccactccagcgttctgccaggcatgggggtacggcgtgtacggcggcgccaccaacacaatgcgctcccccgccttcgacaaacgcgccagggtcggcagcaccagttgcaactcgcccacaccttccttggccatgaggatttcactcaatgccgcctccggccagccgcccgtgggcagcaccgcgtccaacgccgccagcccggtagggtgcacgctggacggcggcgcggcaggccggcccttccagacacgcccgccattaaacagcgtgtccagcgcaaccacggcgcccatcagccttgcctcaccaaaccgcagaacaccccttcgatggccaggtcctggtcaggccccaccacgatgggttgatacgcggggttgcgcggcagcagacgcacgctgtcgccactgcgctcgaaacgcttgatggtcacttcgccgtccaggcgcgccaccacgatctgcccgttcaaggcctcggcactgcggcgtacgccgaccagatcaccgtcgagaataccgtcctcaatcatcgaatcgccctgcacgcgcaacaggtagtccggggttttcgcgaaggtcgacgggtccagttgcaggcgactgtgcacttcagcatcggcgccgataggcaaacctgcggccacgcgaccgagcaccggcacatccagccattccgggcgcaccggctggttgagcaggcgaatgccacgcgcctggtgggggttgacctcgataaacccggcttcggtcagcgccagcacatgcttgcgcgccacgctgcgcgaggcaaaaccgaacgcctcggcgatctcggcgaggctcgggggctggccttgctgcgcgatgcggtcgcggataaaggtcaggatggcggtacggcggggggtgagagtcgtcatggagtacatttgtactcctgtgggaaatttctgacaatagccgctagtcgcgcgatagcggacaagcgttatcgaaccgtcccacataaccgccggataagctctactcccctgccctgcaaacgcccgcaaagtccgtcgcctgactacacagtgcgagggattgcagatggcgttatgggtttgggctccggtggatggggctgtttcatgatcgaagtgaccagccaaaccattggctatttggtactggccaccctggattcaaagacgcgagacgtcgaatccgttatcagcgacttcaagcgctgcctcaatcactacgacgcctgggcttcgagctttttcagcttttcggcgctggatatcgaacaggtcttcaaggtgggggatgaagtggcgctggtcgcgccgatcaaccgctccctgtttcccagcacaaccaccgcaacctgccgggcagacggcacgctgaccctggtgcatatgttccagagttctcgattcgtacccatcggcgatacgcccgtgatggtgcagcgcatcgatccggacggtggcccgctcggggagcccctccataaaaccatcggacccagcggcattctcgaaatcaaggaatgtgatcgcaaccagcagtaccgggtcagtttctaccccaacgtttccaaggcgcacttcaaggcgctgtacgcctcttaccagtcggttatcgaaccgctggaaggctggttgcgccgtgagtggaccaccaccttcgccgccttatggatgggttattccgaagccaactttctcaagcgctacctctcgctgcaccaagcctacgcacgcgggttcagcggggcgttgtattcactttgggacaacatcaagcagatgcttcagtggtttctggacccactgaagcatgccgaaaagctactgcattacctgagccaggaagaattcgaaaagctcttgaagcttggcaccgaaagcatcgcaaagggcctgctggtgctgagtgatgagccgttgctgttcatttatctgtcggcaatggtcagttggatgcggatgttaccgccgccctatatgaatgagctgctgggggaaatcagcgctgaagtattgatcaatttgctgctgtgccttgccacggccggtatggggatggcggtacgcatcagtacgaaggtgctgggcagcatcaagtctcaacgtgtgcgcacatggcttgagcacatggctgggcagttcgggaaatttcgtgcggatgatcacacgcaggtggccaagccgatattgctcagtagccaggcgacgacgatcaagacgattccggatgcgcccttgaaggctggggatcaggtggttgccaacgcggtgccggtggttcgggataaggccacgcagcggacggtgctggtgcggcaggagcctgtggatgatgtgccggcttctgctcgaaacccgaatggggatgcggcggcgcctgcggacaagaccgccactaacggctgcccggtgtcgatggtcaccggcgaggaattgctgacccttaccgatgggacgctggacgggatcttgccgtttgagtggactcgcttgtaccgcaccagtgcggtggaagtggattgcgggctggggtttggctggagtcactcgctggcgcatcggctggtggttgagggtgattcggtggtttggaccgatcatgagaatcggtcgaccaccctgcccttgcctactgcctctcgacctgcgatcaccaatagcctggccgaagcggcgatctatttgggtgctgcgcccgatgaactggtgctggcgcaggcgtcacgtttctaccacttccgcgacggtgtgctgacggcgatcagcgatgcgtatgacaaccggctgcgtatcactcgggattttctggggcgtgttgagcgggtggataacggcgtcgggcgctcgttgtggttgcgctatgtgtcggaccggattgtggcggtggattaccagattcatcgcgtcgtggatgacgggccgtttgtttgggtgacggagcagaccgttgtttcctacgcctatgacgacttgggacgactggtttcagcgaccaatgccgtcggtgaaagcgaggtttatcggtacgacgaacagcacatcattcttgagcgcggcttggccggtggggcgagctttttctgggaatgggaacggtctggcaagacggcgcggagtgtgcggcattgggcgagtttctcgcagatggacacgcgctatgcctgggatgacaacggccaggtcacggtgtttaacgccgatggcagccaggaagtctacgtgcatgaccagcgggcgcggctggtgcagcgggtcgatccagacggtgccgagcatttcaaatcctacgatgaccaaggccggctgaccgttgagcaggatccgctgggggcgatcaccgcgtatcagtacgacgaagccgggcgcttggtggcggtgtttccgggggacgatgagccgacgacctacgagcatgacaacgggttcgtacgggttgtgcggcgtggtaaagcggtttggaagtatgagcgcaatgaccagggcgatgtaacgcgcaagatcgatccagacggtcacgttaccgattacacctacaacaaatatggccaactgattggggtttggtacccggatcacagctgtcagcggctggtatggaacgagcacgggcagttgcttgaggagcagttgcccaatggtgggatcaagcgctatcgctatgacgatctcgggcggcagattgcacgggaagatgaacacggcgcactgacccagtatcagtgggacagcgtgggtcaactgattcgcgttgtgctgccaggcggcgagttcagggaatacagctacaacccctacggaaaaatcaccgccgagcgcgatgaactcgggcacgtcacccgctacgaatacgccgacggcctgcacctgatcagccgccgtatcaatgccgatggcagccaggtcaactaccgctacgacaacgcgcggttactgctgaccgagatcgaaaacgaggtgggcgagacctaccggctccagtaccacagcaacggcctgatccagcaggaaaccgggtttgacggtcagcgcaccgcttacgtttacgaccttaatggcaacctttcggaaaagaccgaacacggcgatgacggcagtcagttggttacccgctaccagcgcgattacgccggacgcctcgtcagaaaaaccctgcccgacggtggcaaggttgattacacctacgaccgccagggcaatctattaggcgtcgaagacggccactggtccctggcctacgagtacgacagccaaaaccgcctcaccgccgaacaccaaggctggggcacgctgcgctacgcctacgacgcctgcggccgattgcaaaacctgcgcctgccggacaacaaccgcctcaccctcaatcacgacaaaggcggccacctcgccaccgtcgaactgaacggcgttgtacttacctcacacctgttcaaggcaggccgcgaacagcaacgccaacaaggccaactgctcagccactaccaacacgaccaccaaggccgcctgttcaaccagagcatcgttgatgccgaaggcccggtctaccgccgtcactacgactacgacaaatccggcaacctcacccgcctgctcgacacccgcaaaggcgaacaccgctaccactacgacccactcaaccgcctcacccgcgccgaccactcgcaagacgaacaggaacgcttcggccacgacccggccggcaacctgctcatgcacaaccgccccggccccgacatcgtcgccggcaatcgcctgatgatccagggcgaccaccattactactacgacgccttcggcaacctgattcgcgaacgacgcggcaagggccatcaactcgtcaccgaataccgctacgactgtcagcatcgtctgatcggcgttaagacgcccaacggccagactgccagctaccgctacgacccgtttgggcggcgtatcagtaaaaccgtagatgggattacgaccgaactcttctggcaaggcgacaaactcattgccgaacaccacgccaatcggcaccgcagctacctctacgaaccggacagcttccgcccgctagccttgctggaaggtttcggccccaaggaaacccaggcctaccactaccaacttgaccacctgggcaccccacaggaactcaccgcccaggatggcgaaatcgtctggtccgcgcactatcgcgcctacggcgaaatcagccgcctcgacatcggaaaagtcgacaatccgctgcgtttccagggtcagtatttcgatcaggaaagcggactgcactacaaccgccatcgctactacaatccggatgttgggcgttacctgacgcctgatccggtgaagctggctggcggaattaacacgtacctgtacgtgcctaatcctacggggtgggttgatccgttagggttagcctgcaaatcaacgaactgcccccaactgatcaacgctcaaaaatgggaattgaaacctgctgttgatctggactggcgtaatcaaaacggtagtgcctatgagcaaatgcatattggtttagatgaagcttttcgcaggacagatatacctaaggatgaatacagcgtcacgaagtggggtaaagaccaatatggaaaatcttttccaaccgaatggagggttgaaaatggaccaaaaaaaggagcggaagtcaacatagatgaccctacacttgtttttagcaagaaaggtccacaatcaccacatattggctaccaaactccaggcaaaagaaccggtggaggagcagtaagaggacatatattgctcaacctgctcccagttagccgttcaaaaataggggaaaactgatgaattatctagaagcagaaatagacgaagtgctcagcacacttagtattaaacataaaaaacttacaacagaagagattagctcattaatcaaagcattaactagacgttttttcacaactgaaaaatccacacttgaccctatggacttcaatgagacaaatgccgagtacaactcgaatttctggaaagaaataacgagacacataaagaaaacagatctaacactaatcgtttacgatacaaactatagagcatggcaaataaataccccacaggacattgaacttcttataggtgaaacaactggctatccattctggctaaccgatcgcgccctaacatttttgatccacttggacgaccatgactgtgtaagctcagcagaaaaagaatgacaagtactcagcaacagaaacaccgccaccgaccgctaaaacttcggacattaggcccccactcgagaaacacacacccaagcaaaattaaataaattaattttccgaaaaagaaacacctgaaatacttatagaatcaaaccccacttttagttctaggtaaaaagggcaattactatactgaaatccttgcaatgatatgaactactaccccccaatccaggcgaagaaggttttcaggtaaatcggctacggctacgacgcctgcggccagctgcaaaacctgcgcctgccagacaacaaccgcctcatcttcaatcacgacaaaggccacgccctcgtcaccgaataccgctacgactgtcagcatcgtctgatcggcattaaaacgcccaacggccagaccgccagctacctctacgacccgtttgggcggcgtatcagcaaaaccgttgatgggattacgaccgagttcttctggcaaggcgacaaactcatcgctgaacaccacgcggatcggcaccgcagctatctctacgaaccggaaagcttccgtccgctggcgctgctggaaggttttggtccaaaggaaaccaaggcctaccactaccaactcgaccacctcggcaccccgcaggaactcactgcccaagacggcgaaatcgtctggtcggcgcattaccgtgcctacggagaaatcagccgagtcgacatcggaaaagtcgacaacccgctgcgttttcagggtcagtatttcgatcaggaaagcgggctgcattacaaccgccatcgctactacaatccggatgttgggcgttacctgacgcctgatccggtgaagctggcgggtgggatcaatgcgtacttgtacactaccaatcctacgggctgggtagacccaataggatttgcctgcgcgcgcggtaattgtccgggacaaagaagcaaattaaaaaaaccacacgagaaagcgccccctgaaataggagatgtggttcactctgtcacttatgaacaggctttaaacaaagctctagtgtggttattagaaaataatttccgggcagaaataccaaagccaggaaaatttggaaaaagaaaaggggatcccataggaatgcaaacatccgatagacaaactggctatcgtgttgaatacgaccaaaatagtggcgcacatatcaatgtatggacccataaaaaaaacggcccacattttacatttgaaggagacgaaaaattggtgatccagctaattaaaaggtttgcaaagaaatgagctatcttgacgatgaaatcattgacgacttcaaaaaaatcaacataaaaatcaccatcctaacaaaagtcaaacatgacctcatggtagaaaacatcagtcaaaacatcccattctccgtaacaaatatcgcatggaacttattgaaagatagtatctatctgggtgtagcaacatcacaaacgtcaatggatgcacttgcagaaaaaatcacacacaccacaaaagcggacatcattattataggcgacgccaccgatgaggcttattcaataggtatcaagcagctctccccagcattgagaatattttcgacgattccgcagcatacatacataactcaagaaagcttagattggatagcaggcatatcttttgaaggctatatatatttttgcaaactccaaccccccaaaaacacaatccgacatcaagaaaaaaccgagtaaaaataaatgttccaaaacacatgctagaaaaaactgaaatccaaggattgctgcgtttacctatcgaatatatacatcgattttgattgcgggcctgatgatagggtcgacggttttgacctctggcggttatatgtttacacatgttagctgccgcaaaaatacaaaaagtacaccgacaaagaatacctggcgcatgaattcgatgaatatttgaaactgggcaaagccaagaaaatcccaagctccatgtccagtctgtacttcattcagcaatgaacatgactgcccagcctgatgagcaatcaggccctcacccccacgccaccagcaacaaccccagccccaacaccaaacacaacggcgaataaaaatacgtataccacctcgagaaccccgctgcgcttccagggccagtatttcgatcaggaaagcgggctgcattacaaccgccatcgttactacaatccggatgttaggcgttacctgacgccggacccggtgaagctggcgggtgggatcaatgcgtactagtgcgcgcccaacccggaattattgagcgctacacatcgggcccaaacacaggggaacctaaatacccacccgctgcaacacattatctcgtatgcgatccataaaccccacctgcccaacagcaggttaacggtttaccgtggcatctctggcgagcagttccatggcagcagtgcttcgtagtcctctactgccgaggcatgcggcagcctctccagtacgtggcgcagccacgtatagggctcctggccgttgaccttggcggtctcgaccagactatagatctttgcgctggcagtggcgccgttgacggtatcgctgaacagccaggccttgcgcccgatgacaaacggcttgatcgctctttcggccgcgttgttgtcgatgggcagataacccgcttcgacatagcgttccagtcggctccagttattcgccaggtaatgcaccgctttgcctaatgcactttgtgccatcacctgcggctgggttttatccagccaggcttttaactggcccagaatcggcaggctcttttcctggcgaccgataaaccgctgctcatcactcgcgtctttgagttcacgctcgatcccgtacagcttgttgaccattgccagcgcgatatcggcccgtccggttttacccttgggctgcactttttgcgcatccacgaacttgcgtcgcgcatgagccatgcaggccagccgttccacgcccggttgcaaggccaaggcgttatagccggcgtaatcatcggtcatgacataaccacgataactttccagcaggcgcagcggcacgtcctgcgcacggctggaggtgtagtcgaacagtacgactttacgatcaggcgggccgctggcttgcacccacatccaagattggctggtcgggtctcgatccggttctttcaacacctggacgcgggtttcatcacagtggatcaccgggctttccagtaatcggtcgcgcatcaaattaagcagtgactggaagtgctcgctgcactggatcacccagcgggccagcgtttgccgaggaatttcgatgccgtgtcggctcagcacgctttcgaaacggtgcagtggtaaaccgtcgacatatttcgtggtcagcagcatggccaatacgcttgggctggccatgctcttttcgatcagttgtgcgggtttgtcagccgtgacaggggctgcttcgcagccccggcaaccgtagaccttgcggatatgtttgatgacccggatctgcatcggcacgatatccagctgctcgctggtttcttcgctgatcacatgcttgcggcaaccgcaggcacaggtctgttcgtgttcgggtagttcgtggatcacttcgatacgcggcagatcggccgacaatggcttacgtttgccacggcggggtgtcggctcaacgacctcttcatcagcgtcgcccactaacgacatgggttcgctttcaggttcgttgaacaaagccagttgcggcgtattgggctcaacggtttgctcggacttgcgcccaaacagacggtcacgcaacagcttgatctgttctttaaggtcgacgatgtgggtctgataagcctgagctgtttcgtcctggcgattgagtgcctcaagcagcaattgcttgagcaaaacaggatcatctggaaggtcgtcgggcaaagaaatcatggcccggattataccgggtcacgccacgtagcgcggcgtcaaaacctgatgagggcggttgcgccagaggtcaaaaccgtcgagcagccagttcagctcctggacgctgaggataatcgctacgtccgtgtcatcgggggatgttttgaaacgctcggattccaggcgcttgagccaaagacagaagccgttgcgttcccaatacaatatcttgacccggtttcgggatttgttgagaaagacgaaaagcaccggatcgaagaccgccacttttatatccagttcgaccaatgccgcgagaccgtcgatggattttcggaagtcgacgggcttggggtagaggtacactttttcgactttggcgtcgggacgcatcatggcgaatgggctcctgaaagaaatcgggagcacagcatccgggatcacgtggcgggtttgaatgtggggttcatggagcggttacattatctcagccatagagatcagttaaactcgatataccgagcccagcttatttttagacgaaacggacacacttcatcattagaaccaatgaatatgggaaaatttgttggcgaaggatactcaagagaaggaatagaatatagccaacaacgtaaagcaagggtgatattaaacaaccaaggccacccaaaaactgcatacacggagaaatgactaaaatgaaaaataagcctagcatgtcaataatccgtggactactgttcacttacgacattgaaaacactgacgacttagagcgagaagaactaattgcatcaaaagacgtaaataatgaaaaagaactttccgatctttttgacgagttaaccaaaccagaatttctcgattatacgaggagtgagcaggagtggttcattgcctcgatcacacatttcttagccatcaatgacaattttgatgcgattttcaaaagcatggcaacctatttcagcgcacccgtaattaatcagaggaagtttatgcaggtcttattgagatgtttaaaaaactactacgactcgccaagatcggagaattaagaaaacaagcgcatctggcttctgcctgggtaggtatcgaagaattctaataagccagcctcgaagactggtcaacctggtaacccaaacaccgccctccaaggcaacaccgcccctctgtggcgagcaggcttgccctgcgttgggccgcgaagcggcccgagtccaggcgatgggtgttttcaggtaacccggcattgtctgttttggggctgctgcgcagcccaacgcagggcaagcctgctcaccacaggaaggctgcgaaccacaacaagcgggttcacccaaacaaagggggctcaccaaccttccttgagcatgcgcaactcaagatgctgcaacaacatgatggtcttcccatccacaatctcgccgttctgaaccattgccaaagcctcttcaaagcccagctccagcacttcgatatcttcgccctcctcttccaagccaccgccagtcccaacccgatcacccggctgatattcacccatgaaaaagtgaatccgctcggtcaccgagccggggctcatgaacgctgcgtagattttctcgacatggccgacgcgatagccagtctcttcctcggcctccaggcgaatgcgttcttcgggactggcgttatccagcaacccggccgccgcttcgatgaggtagccatggtaatcgttgacgaacgtcggcatgcgaaactggcgaatcagcaacaccgtacgctgcacgcggttgtacagcaggatggtcgcgccattgccccggtcgtacacctcgcgggtttgggcttgccagctgccgtcgcggcggcgcaggtcgaagctgtattttttcagcaggtaccagtttttcgaaagggtctcttcagcggtgatgcgcacggggctatcagccatggtcgttttctcaagaaagggaatgtgtctgtttgatgcgatcccaggcagcggcgacttcttctgcgctgctggccttgatccgcgccagattacgcggatattcaaccccggggttttccgtaaaccgcgtggcggtgaattggccgttgctcgcgcgcaggatgtagccggtgtcttcacactgcgccgacgccaggtacaccccccctggcgtcacccactccggcttgagttcatccggctcgtcagtcacgccccacatgcgcgtcttcgccaccggcgagattgcattgactttgacgcccgcctccagcccctcatggctcaacgcattcatgatccccagttgggccatcttgccggcgctgtaggccaccaggccggtttgctcgtactgcgcgtacatggcgcggtcggaggtggtgaggatgatgcgcggcgcgggtgaacgcagcaggtgcggccaggcgtgcttgcacagccacagcggggcgtagaggttgatgtccatggcacgctgcaggaacgtggcgtcgaggtcggtgatgttctggtaacccacccagccggcattgtgaatcaggatatcgagttggccaaagacctcgagggtgtacgcaaccaactgccggcagccctcgttcgtggacaagtcgccgccgtgaccgatcacgtgcaagccttcggcctgcaacgcctttgccgccgcctggacgaccgttgcatcgctgcctgcgcccgcgctgtcggcgccgatatcgctgatcaccacccgtgcaccgccctgggccagggcccgtgcgtaacagagccccaacccgcgtgcgccgccggtgacgattgcagtcttgcctgtgaaatccatgtgcttgctctcctgttcggcggcccaccctaacaatctctgcacgtattgttcaatgcagtaacactttgtaagaaacacccatgggcggctgtcgaattaatacctgcctgggcaagccatctggtaaaacccctgcttgaccttttacctggaaccttcatgtcctcacgttttctctcgcgcctgagcctgcgctggtttcccctggtgtgcatggcgctgttgatcgtcggcctgccggtgggctgtgccgtgctgcaacacaaggaacgcgaactggtgtttcgcatcgagccgggcaccgccagttggtacagcggcttgcccaaggcggtgcaggaattcgagctcaagccggccagcttcaaatcggggcagaatatccatggctggtggtacccggcggacaagaaagatgctcccgcgatcctctacctgcacggcgtgcgctggaacctcaccgggcagctgtttcgcatcgagcaactgcacgccctgggttattcggtgctggccatcgactatcgcggtttcggccagagccacggcgagctgccgtcggaaaccaccgtgtacgaagacgcacgcatcgcctgggaacgcttccaggtgctgcaacccgacccacagaaacgcctgatctacgggcactcgctggggggcgcggtggccatcgacctggctgccgaattgggcaaacagacaccgttgccggtgcgtgggctggtgatcgaatccacctttacgtcgctggcggatgtagccaccgccgtggcgaacacctcactgccggtgcgttggttgctgtcgcagaagttcgattccatcgacaagatcgccgacatccatatgccgctgctggtggtgcatggccttgacgaccgctatgtaccaccgcgtttcagccagcagttgtttgaagccgcccgggagcccaaacggctgttactggtgcccggtgccagccacaacaacagcatgagcctggccggtcgcagctatggccaggcgctggacaaattgatgcaagcgaagatgccggcgcaggttgtcacccactccacaggccgcaacggcgactcgtaaaaacgtttttcggcactgggttagcgcttgcctgtcaagcgcaaacccagcccatgctgggccaaatccgaagttgatcaaatattgatcttggcttaaatcgccaaccctgccggggcttcgcaaagttatccacagagatacccacggttttcgtggacaactctttttatttttttacgttttttttgctcagaaaaggttttccgggaatgtccccggcaacaaaatctcgcgattcacatcgcgtatatcgttatacccacacagcgccatcgtcacgtccaactcacgggcaatgatctcgagcgccttggtcacacccgcctcgcccatcgcccccagcccatacaaatgcggccggccgatcatcgtacctttggcacccaacgccactgccttgagcacgtcctggccggagcgaatgccgccgtcgagccacacctcgatacgctcccccaccgcctccacaatcgccggcaactggctgatgctcgacggggcgccatccaattgccgtcctccgtgattgctcaccaccaacgcatcggcgccggcattcgcggccaggcgtgcatcctccacatcgaggatgcccttgatgatcagcttgccaccccagcacttcttgatccactccacatcatcccaactcagacgcgggtcgaattgctgggcggtccaggacgacagcgaactcatgtcggccacgccttttacatgcccgacgatattgccgaagccgcgccgtttagtgcccagcatgcccatcacccaacgcggtttggtggccatgttgagaatattcggcaacgtcagtttgggcggcgctgacaggccgttgatcaagtccttgtggcgttgcccgaggatctgcaggtcgagggtcagcactaatgcatccacgccggcggccttggcgcgctcgatcaattgctcgataaaggcgcggtcgcgcatcacgtacagctggaaccagaacggctggccgacgtgctcggcgatgtcttccagcgaacaaatgctcatggtcgacaaggtatagcgcaggccaaaggctgcggcggcgcgagcggtgagaatctcgccatcggcatgctgcatgccggccaaaccggtcggtgccagcgcgacgggcatggccatatcctggccgatcatgctggcgcggatcgagcgctcgtcgatattgcgcgccacccgctggcggaacttgatgcgggcaaagtcgctttcattggcgcggtaggtgctctcagtccaggagccggaatcggcgtagtcgtagaacatgcggggcacacgtttttgcgcgagcttgcgtaaatcttcgatggttgtgatcaacgacatctaggtcacctctccctggactgaacgctgagagtaaccgcccatcgcgcgcacaaccagccattgcgtttatagcccagggcaattaatctcgcacaaacccgcaaaaagacgcaaaaccatgcacaacacgcatcaagccatcgacctgccttccttgcgcaaacagaagattttgttgctgctggagcgcgacggcaaagtcaccgcctcggagttggtggagcacttcgccgtgtcccaggacaccattcgccgcgacctcggcgaactcgccgccgccggcctgctgcaacgcgtgcacggcggtgccttgccccgacccaaagacaccggcaaggattttttcacccgagtgggcgaaaccaacgacgccaagcgccacctcgcgcgcctggccgccgagcgggtcgaggacggccagatcgtgctgttcgattccggctccaccaccctgcagatcgcccagtcattgccgcactcgatccgcctcacggtagtcaccacatcgcccatgatcgccatcgctctggccgaccatcccgacgttaaagtgatccttaccggcggccaactcaacccggccacgctgtccaccagcggtcatgaaaccgtgcggctgatccagagcgtcaaggccgacctgctgtttaccggcgtgtgcgcgctgcatccgcaagtcggcatcagttcgctgcattttgatgaagtggcggtcaagcaagccctgctcgacagtgcgtcccacgtggtggcggtgaccatggccgacaagctcggcgccgtggagccgtttgtggtggcgccgtgcagtcgtattcacacgctgatcaccgaatggcacgtgccgagtgtggaggcgtatgaacagctagggttggaagtgctgcgggtagaggtcgagtaggcacagtcagaacagcacctcggacgcatcgcgcatgaaaatctcgatggtcttggggcctacaccgtcgaattccccaaggcgtttttcgaaggcctcacggctttcgctgacactgcgcatatgggtgatcttgccggcgtattcggcgttcaacctggcgctgaggtcgagcaagcgttgcgcggtggtttcgtcatagcgcacgtaatgtgcgcgtccaagcatggccaccaattcacgcgatgtgcagtgctgcagcttgcgcgcagtgtcacggcctgcctcctcgacaatcactttataggcctgcgcggcaatcggtgcctggatacgcttgcccatcaggaagctggcgataaaccacttgaacagagcgtggtcatcgccgggcttgaggtcgatgcccaactccgtcgcgctgatggcacgggccatgctcagtggcccagcttgcgctcggccttggcggcctgttcgttgatggcatcggtctggcgttcgatgtcctttatcgaggtgggcgtcaccactttatcgatggtttcggtcttgggattcgggcggtccagggtttggcccttgacgggtttttccgtgccgctctgggcttcttcagagctgatgggtgcaggggttttatcggcagtcatggtgtatctccagtcaattgaaagcccgtgaaaacgccgggcgcttaagcagcagaggcttgccggtgtggatagttcaaggaaattgcccgcgccaaccgtccgagaaataagcgcaaattaatttaaacctttgccgtgcgagccggatcaactctcccagatcccattccccatcaggagacactcgatcatgagttcacacctaaacggcaagaagattctggtcatcacctccaataccggcatcgagcgcgacgagctgctcaaaccgttggaagcactgcgcggttatggcgcgacggtgacccacgcctccagcaagggcggcaccacacagacttttgtcggcgacaccgagaaagaccagacggtggaatccgacgcaaaactgtccgagctcagcgctgctgatttcgatgcactggtcattcccggtggcaccgtcaatgcggacacgttgcgccaggatgcggccgcgttgaagctgatcaacgcgttcgtgcaggccggtaaaaccgtggccgcgatctgtcacgggccatgggcgctgattgatgcaggcgtaatcaagggcaagaccctgacctcctacaagagcgtgcgcatcgacctggaaaacgccggtgccgccggctgggtcgatgccgacgtcaaggagtgcaaggctaacggctggacgctgattacctcgcgtacaccggacgatctgccggcgttcaatgaggcgattgccaaggctttggcaggctgacacccaagggctgaacgaaaacaggcgcctcgaaggcgcctgtttttttatgggctgatgcctcagcttttacgatgctccggcatttcccgtttcggcccgaacatcgcccaggcgatcagcccgaacagcggtacaaaaatcagcaccaccagccacaatcctttcgactcccagccccccgtgctgcgcaacacgatattgatcgcccacaattccagcagcagcagaatcactgccagaccaatccagatatattgaatttccatgcttcacctcctaggtcatatgccttaggtcaagcaggggccgcgagggttcattaaaattttcgcgatggctcatccgcaacgggtggctcgggtgtaagcccccagtcgccgtgttcataccagtcatcaccgagcatctcggccgggtgcatggtgcggtcggcaccattgccgcaggcgaggtcggaggcgccgcaatagcggtcacacccccagcagatgcgttcagggtgtttgggatgcagcggaaatggcttggccatgaagcagtttcctaccggcgaactgtgggtcaagcctaacgccacgatcccaacccagccttgacccggatcaagccgggcaatcatgaaatatcctgcaaacttgacaagaatcattattattcacgccagaccttcctagactcgggctctctcccctcacccgtcaggaagccctcatgcgtacctcatccctgctgcccatcctcctgttgatgaccacctgcgcagcgtccgcgaaagagtatccaatcggcgaaccgcaacactgcccggggctggaaatcggcgcggtgtacctgcaaccgatcgagatggcccccgccggcatgatgcgcgccaccgccgattccgacgtgcacctggaagccgacgtgcgggccaccgcagacaacgcgcagggttttcaggaaggcagtttcgtgccttacctgaacctgtccttctcgctgaaaaaacaaggcgacacgccgcccatcaacggtgacttccacgccatggtcgccaatgacggcccgcactatggcgacaacgtcaagctgcaagggccgggaaaatacagcctcaccttcaccgttaccccgcctttcggccaccattccctgggccgtcataccgacaaggaaaccggggtcgcgccttggttcgaacgctgtgaagtgcactacgaattcgtctacgccggcatcggcaagaaaggtggttattgatgcgccgcgccctgctgctcggcgggtgtgtgctgaacggcgcagccttggcggcaccgttacccacctatgaactgaacctgcaagacggccacttcaccccaccccaattggcggtcaaggccggcgaacgtttcaagatcgtgctcaagaacctcggccaaggcccagccgaattcgaaagcacgccgttgcgggtggagaaagtcttgtcccctggggtgaccacctttgtggtgatccaccccctcaagccaggcacctatccgttcttcgacgaattcaacccccaactgcccgaaggcagcatccgtgccgaataggagccgttgatgaacacatcgatgtttattgtgtggcgcgaaagcgtcgaggcgctgctggtgattggcattctgcaggcctggatcagctgccaggccggtcgctcacgcctggcccgttacctctgggccggcgtgctgctgggcctgctcggctccgccgggttggcggggttgatgctgtgggccggcgaaaccatgaccggccccgcgggtgaatggctacaagcggcgctgaccctggtcgccagcggcctgatggtgcagatggtgttctggatgcatcgccatgcgcccaccctcagacaccggctggtcagtgaagccgaccagcgcctggcccgccacggcggctggggtgtgttgctgctggccctgctggcggtaagccgcgaaggcagtgagaccgtggtgttcctgtatggcgccggtgcccgtctgcacgacgaagccctgggcctgtttgccgtcggtggcgtgctggggctagtgctggccgggctgaccgtggtgctgttgcgcagcagccgacgctttatttcctgggcacgttttttcgccctcagcgaagccttgctgttgctgctgggcggcgcgttattggtcgctgcggtggaccgcatcagtgggcagctgctggcgatggacatgcccgactgggtctactcggccttcggtgacagccgctgggacagcagcctgctgctgaacgacagccacggcctgggcgcgttgctggcagacttcgccggctaccgcgccgcgcccagcctgatcacggtgctggtgttgctcggctattggctgctggtgggcaacggcctgcgccggtcacggcaagccgcatgagctggctacagcaactgggcgatggcatgcgccgccatgggcggctgatccgaagtgtgcaatgggcggtggtgctggtgtacgccgtgctgctggtgttgccgacgctgctgcccctgccggacagccaggcgcgcctgctcgacaacctcacgctgcttgcgcaattcatcttctggggcctctggtggccgttcgtgttgctgtcgatggtgctgttcgggcgcctgtggtgcggcgtgctctgcccggaaggtgccttgagcgaatgggccagccagcacgggcgcggcctgggcattccgcgctggctgcgctggggtggctggccgaccctgggcttttgcttgaccacgctctacggccagttgatcagcgtgtacgactacgcccaggccgcgctgctgatcctcggtggttcgaccctcgcggcggtcgtggtcggcctgctgttcgtgcgcggcaaacgcgtctggtgccgctacctgtgcccggtcagcggcgtcttcgccctgctcgcccgcctggcgccggtgcacttcgccgtcgatgaacaacgctggaaggccaacgccgcgccacgcctgccgttgcccaactgcgcgccgctgctggacatccgtcgcctgcaaggcgccagcgaatgccacgcctgcggccgctgcagtgggcaacgcggtgcggtgcaattgatcgcccgctcatgcaaccaggagattctccaggcacccctgcaccacggctcggcctgggacatacgcctgctactgttcggcgtgatcggcctggccataggcgcgtttcagtggacggtaagcccctggttcatcgccctgaagcaacacctggccgagtggctggtgagccgcgactggctatggccgctgcacgacaacgccccctggtggttgctcacccattacccgcaaagcaatgacagtttcagctggctggacggggggtgcatcgtgctgtatctggccggcagctcgctggtggtgggcggcggatgctggctgtggttgcaactggctgcgcgctcggcgggcgatcgcgcactgtttcggcccctggcgctgacattgacgcccctgggtggtgcggggttgttcctggggttgtcggcgaccacggtgaagctgttgcgctatgaaggcttggtattggcgtgggtgcaaccgctgcgagcggggatcttgatggcggcgatcggctggtgcctgtggttggcgtggcaacgactcgagggactgcctcgcggacgggcgtggctgtgcatgctgatgagtaccgggttgatcggctatggctggtggctgcagttctggggctgggccaactgaagcattgagactgtgggagggggattgccccctcccacatttgccaacttctcgctagaccttgaagcgcgccacggtctggtgcagcgcccccgccatccccgccagttcatgccccgccgtctccgtatgcaaggcgccctgcaacacctgctgcgacagggtgcggatgccaatcaggttgcgatccacctcccgcgccaccagcgcctgctcttcggtggcgctggcgatcatcatgttgcgctcgttgatctgcgagatagaccgggtaatttcatccagcgcctcccccgaacgctgcgccacgccgagggtcgcctgcacccgctcactgctgctgtgcatggccgccaccgcgtgttcggtgtcctggcggatattgccgatcatctgctcgatctcctgggtcgaggcctgggtgcgatgggccagcgcgcgcacctcatcggccaccaccgcgaacccgcgcccggcatcgccggcccgggccgcttcgatggcggcgttgagggccagcaggttggtctggtcggcgatgctgcggatcacttcgagcacgctgctgatatcctgcacacggcccgccagttgctggatgcgctccgaggtttccaccacgccggtggccagggtgttgatcgacgccacggtctcctgcacctgggcgcgaccgcgctgggcagtctgttccgacaggcgcgaagcctcgctggtactcaccgcattgcgcgccacctcgtccacggcggcggtcatctcattcacggcggtggccgcctgctcgatctcctggccctgggactgcaagctgctgctggtctggctgctgaccgcgctcaactcttcggaggaactggccacgccgtccaccgacgcggcaatctgccggaccatctggttaaggttctgctgcatctggtgcaggttacgcatcacactgccttcggcgctgttgcccagcggcacttcgatggtcaggtcgccttgggcgatatggctgagtacgcgcgccacctcatccggctccccgcccagcgggcggatcacgctgcgggtgacgatgacggcggcggtcaccaccagcgccacacacaacagcagcagccccagcatggtacgccgggcgtcgtcgtacagcacctgcgccgcctgctcacgctcggcgaacacgcgtccctgcatggccatcagcgcatccaggctcttgaacaccgcaagctcggccggcatcacctgttgcttgagctgggccagcccctgttcgcgggcgccctgtttgatcagcgcctgcacctgggtgaaggccgccacataggtttcacgatgggccttgagggtcgcataggcggcctggccttcggcagtatcgagcaacggttcgagggttgcgaacgcctcggtgatgcgttgccgggtgctgccgatcgaagcttgagcggcctgattatctgcgtcgatcagcaggtcgcgggtgttgcggccgttatcgcgcacgccggtggcgatcaccatgatcggcgcgattttcggccagtcctgctgcacgatctgtgcggattgttgcttgagggtcgccaggtcgtgcaaggcgtagaacaccaagccgaccagggccagcggcgcaatcgcgaaaccgatgacaatgcgttgtgccgtggttaactgcttcattctgaacattccttgatgaacacctgcccaccatgggcagcatctttaaaaaccggttgagggtgtcggtcaccctcgcaagacaaacgcgggaaacaactcgcgcaaacggccccacagctcgggcaacgcagcctgtgccggtgcactcggcaattgcgggtcgagcatgctgacggtgcgcaccatctgcacggcgaagcgctgcacacccgtggcttgcaaacgctgggccagccgcaacaaccggggtggatcgatcaggtgccaatgcaccgtggtgcggcactcgtagtccacgccactggcgagcaaggtgtcgaggctgcgccagttggcggcgccactgcccttgacctgggtgatcgactggcagtcttcggccagggccttcacgtcgaacccgacccagtcggcatgacgcaacgcattggcaaaccctgccggtttgatcccggcgctgtgcaagccgatgtgaaaacccatcgcccgcacttcatccatcgccgccggcaagccttcctgcaaggtcggttcgccgccgctgaacaccacggcatcgagcaagtcccggcgccgttgcaggaacagcagcacccggcgccaatccacctccgtgctggcgcgcggcgggatcaggtccgggttgtggcagtaacggcaacgccaggcacagccctggcagaacagcacgcaggcgagcatgccggggtagtcgagggtggtcaggggcaccaggcccccgacccgtagcgctcggctcattgccgcccggccgccgcagccgtttcggtgaagtgcacgcgctccttgtgctcggactgcttgccggggttgaacgccgaaaccggccggtgataacccatcacccgggtccagacttcgcagcgctgacgttgtggctgggatgcttgcatggtgaatctccttggggttgaaaagcttggtttaacgggcggctgccagggcttcatcgcacttggggcagaactcatgttcaccggccagatagccatgcaccgggcagatcgaaaacgtcggcgtcaccgtgaggtacggtaggcggaagcgccccagcgccttgcgcaccaactgcttgcaggcctgggtcgaggaaatctgctcggccatgtacaggtgcaacacggtgccgccggtgtatttgcattgcagttcgtcttgcagctccagggcttcgaaagggtcctgggtaaagcccaccggcagttgcgacgagttggtgtagtacggcgcgacatcgctgcccgcttgcaagatatcggggtagcgcttgcggtcttccttggcgaagcggtaagtggtgccttcggccggcgtcgcctcgaggttgtagagatggccggtgtcttcctggaagcgcagcaaagtggcgcgcacgtggtcaagcaacttgagcgcaaaggcgcggccctgctcggtgtgcatgccctgctcgtcaccgctgaaattgcgcagcatctcgtgcatgccattgaggccgatggtggagaagtgattgcgcagcgtgcccaggtagcgtttggtgtaggggtagagaccggcgtccatgtgatgctggatcaccttgcgcttgacctccaggctctccatggccatctccatcaggctgtccaggcgtttcagcaagcccgaggtatcccccttgaacaggtagcccaggcgcgcacagttgatggtcaccacccccaggctgccggtctgctccgccgagccaaacagcccgccgccacgcttgagcaattcgcgcacgtccagttgcaggcggcagcacatcgagcgcacctggttgggctgcatgtccgagttgaggaagttctggaagtacggcaggccgtaacgtgcggtcatctcgaacaggcggtcggcgttgtcgctgtcccaggggaaatcatgggtgatgttgtaggtcggaatcgggaaggtgaacacccggcccttggcgtccccggcctgcatgacttcgatgtaggcacggttgatcaacgccatttcggcttgcaggtcgccataggcaaacggcatttcctcaccgccgatcaccggcacctgttcacgcagatcttctgggcagacccagtcgaaggtcaggttggtaaacggcgtctgggtgccccagcgtgacggcacgttgaggttgtagatgaactcctgcaccgcctggcgcacttgcggatagctcagctgatccttgcgcacatagggcgccaggtaggtgtcaaaggaactgaacgcctgcgcgccggcccactcgttctgcagggtgccgaggaaattgaccatctgccccagcgcgctgctcaagtgcttgggcggccccgcctccacgcgtcccggcacgccattgaggccttcgtgcaacaacgaacgcagggaccagccggcgcagtaaccggcgagcatgtccaggtcatggatatgcaggtcggcctcgcgatgcgcacggccgatctgctcgctgtagacctcatccagccagtaattggcggtgaccttgcccgccacattcagcaccagcccgccgagggaatagccctggttggcgttggcctgcacgcgccagtcttcgcggtcgaggtattcgttcatggaggtggcgacttccaccagggtcttgcggtcgcggcgcaggcggccgtgttgttcgcggtagacgatgtaggcgcgcatcgacaggaagtagccggcgtccatcaatacgcgttcgacgctgtcctggatttgttcgacgtccagttggtcgatgcctctcaggcgggccaggacggcgcccagcagcaggtcgacgtcggggggctggtattcgccggtggcggtgccggcggcgatcagggcctggcggattttttcggcgtcgaaggggacgagcgtgccgtcgcgtttgtgtaggcgggtgctggtcaggggggtgagcgcggtttgcattggggggctccagacactacatatagatattttttagtctttaaacacaatatgcggtgatattacgaatagctcggagagtgtcccttgatcgggatcaaggtttttatgatcgggggcatatccgttatttaggtcacggcggatattggttccgcccttacggcgggtcactttggaaaagagcctgtatggaccggacacatggttgacgggtgtacggggacatggtggacacttttcggcggataaacttcgccgggaaatcatcatgccttgggacacgagagataccatgagcctgaaagaaga

SEQ ID NO: 42 - DNA, 14937 bp, Pseudomonas nodulensis
gagccagagccagagccagagcaaaccacccttcaactgatacatgaagatcaaactgtgggagggggcttgcccccgatggcggtgtgtcagccaactcatcagtgactgacccactgtcatcgggggcaagccccatcccacactttgaccgagtaccggccatacaatccggtcggctctaaggccgccgcgctcctgcttttgatctggggcgccccgtcaaacacgctggccgaacgcaggcttgaatccgtgggtaacccggcaggacgccgggttagccgcactgggccatggatggcccattgcggcggcccacggattcaagccggagtgagggcacaccgagcctaggcgaggtgccgagtgttggggcgaagcgtttttggttactttttgcgctcttcaaaaagtgacccgccgtaagggcggaaccataagccgccgtgaccgaagaaacggatatgtacacgacgaccaaacagcccccatcaccccccactcacactcataaaccgcaccacctgcacctcccccgcccccgtaaaatcatgccccaacggcttcccccgcaacgcccgatgcaacgcctcaaccaacggcccatcctccagcggatagcgcctgagcaacccacacaggtccagcgcatcctcctgccccagacacaacaacaaccgcccctccaccgtcattcgcacccgattgcaactgccacaaaaattctgcgaattaggcgaaataaacccgatccgcgtccgcggatgccccgccagccgcacatacctggccggcccaccgctgttctcggtgctgtcgagcaacacatgctcacgggcaatcaccccacgcacttcatcactggcacagaacgtctccccccgcgaacgccccacatcccccaagggcatttcctcgataaaactgatatcgatcccctgctcgatcgcataccgcaccaaccccggcacctcatcgaaattgcgccctttcatcaccacgcaattgagcttgacccgctcgaaccccgcatcccgcgccgcctcgataccgtccagtacctggcgcaagtcaccgttgcgggtgatcgcccgaaaccgctcggggtccaggctgtcgaggctgatgttcatgcgcttgacccctgcgtccactaagggccgcgccaatcgcgccagttgcgagccgttgctggtcatcaccagttcacgcaagcccggcaacgccgcgatgttgcggcacagcccgacaatcccgggccggatcagcggctcaccgccggtcaggcggatcttgcgcacgccctggtccacgaacaaccgggccaggcgttccagttcttccaggctcaacacctgctggcgcggcaggaaggtcatggtcttcgccatgcagtacacacagcgaaaatcacagcggtcggtcaccgacaagcgcaggtagtcgatgctacggccgagcccatccaccaggctcatgtcactgcaccaacggcgagtcggcgccctgcagcgcaaggccacgaatgtccgccgcgccgatcagggtttgcaggtactgcaccaatgccttctgccatacgccttgttgcagctgggtgcgaatcgccccggccacggcttcatagggcagaggttgcccttcgatgcgctggtcgatgctgatcacgtgccagccatagcggctttccagcggtttgtcagccaggcccggtgccagggtgaacagttggcgttccagttccggcacggtctggcccttgctgatctggcccagcgaaccgccctgggccttggaggggcacgccgaatacttgagggccagctcggcgaaagtaccgggggtctgcgccaggctcagcaacaggatttccgcctgcacatgggccatctggcgtgcctcggcatcgtccggcgcgcactcgagcaggatgtgccgcaccgccagcaacggcgcgctgtggaagcgcccgcgattgctctcaaagtaatgccggcaggtcgcttcgtcgcactgcggcacgctgatttcgcgctccagcagcaagcgcgtggccgcttcctcttcgttctcgccgggggcgatgtccaccgccaggcccaattcggcaatacgctgttgcagcaactcgcgaatcaccagggcgcgggccgccaggtacaccgccgcctcgcggctttcggccgggtggtattgcaactccagggccatcgcctcaggcgtgatcgacacgccgttgacgctgacgatgggccattcctgttcactgctggcaatcaattcaggctgggtcatcacgcgctcctcacgacttctgccgcacgatttggtaacgccgccccaggtaccagatcggcgcgctgaccatgtgcaccaggcgggtaaacgggaacagcacgaacagggtcaagcccaatgccacgtgggccttgtagatcagcgacaccggcgcaatcgattccgccgcctgcaccggtcgcagcaacaccacgttctgcgcccagtcggcgagcatcaccatcaccgagccgtccatgtgcccggtcgaggcgacgatggtcagcaaaccgagcagtaactgcgccagcagcaccagcaggatcaggatgtccgacgtactcgatgtggcgcgcacccgcgggtcgctcaagcggcggttgaccagcatcagcaagcccaccaggcacagcaggccgaagaacccgccggagaccatcgccagcagttgcttgttttcagtgctgattacgtggtgatagaccgacgccggtgtgagcagaccgacgaaatgcccggccagcacaaacagcacgccgatatggaagaagttgctcgccacgcgcatgccacggttgttcagcatctggctggagccggccttccaggtgtactgcgacaggtcgaaccgcgcccaactgcccaacaggcagatcgccagggccacataggggtacaccccgaataccagcaaattccacttagacattacccacctccccggccggcacggcggccggcgctgcttgctgaaaatccacccaatgcagcggcacggcgctttcttcccgtgccttgccgggagcgctcggcatcgcgctgcaacggtcctgctgctcggcctgcataaagtccacggcctcctcttcccatactttgtcgagggcttcgagggagtcgtcgcgcggctcggccgccacctgggcgcgcacctcggccacggcctggtgcggctcggtgccggcgatctgcaacagcgcgcgcatgcaactggcataggcgctctcacgctcttccaggcgcgccgcgagcaacgccagcaggtgcgccacatccgccaggccctcgcgggcctcgatgtcttcgcgggtggagaggaactccaggtacagcgggatatagtccggcagctccttgacgccgatggcaaacccggcggcctcgtactgggccatcatgtcgaccatcgcctggccacggtcccgggactcgccgtgcacgtgttcaaacaacagcagcgacagcgagcgaccacggccgaacaacgcgccgtaatgctcctggccatccatcaggtcattggcgcagatcagctccaacagctcgaacaacgcaccgcgttgcttggggctgatttcccgcgactcgatgatcgcctgctccagttcatcgcggccgttcaccagggtctcggtgggatagtccagcagcaacgaaatcactttaagaatgcgcatggctcagtcctcccagatctgcacggttttcaggacgtcgcggcgattggccttcttggcgccgaacatattggtgtcggaactgccgctgcagccgctgccgaagctgaaaccacagccggaacgttcggcgaacgcgtcgctcatggcgtcttcacggtgcgcgctcggcaccacaaagcggtcttcgtagttggcaatcgccaggtagcggtacatctcttccacctgcggcacgctcaggcccacgtcttcgagcacttgcaggtcctgcacgccatcgacctgctgggaacgcttgaacgcacgcatcgccaatagacgcttgagggcacgcttgaccggtttttcatcgccggcggtaagcatgttggccaggtagcgcagcgggatgcgcaggctgtccacgtccgggatcaccccgttcatgcccacggtgccggccgcggcggcgttctggatcggcgacagcggcggcacgtaccagaccatcggcaaggtgcggtattccgggtgcagcggcagtgcgagtttccagtccaccgccatcttgtacacgggggaacgctgcgccgagtcgatcaccgactgtggtacgccatcggccaaggcctggcggatcaccgccgggtcattcgggtcgaggaagatctccagttgtttctcgtacaggtcgtgctcgctggccgtgctcgccacttcgctgatgcggtcggcgtcatagagcaacacgccgaggtagcggatgcgcccgacgcaggtttcggcacacacggtgggcatgccggcctcgatgcgcgggtagcagaagatgcacttctcggacttgccgctcttccagttgaagtagattttcttgtacgggcaaccgctgatgcacatgcgccagccgcggcatttttcctggtcgatcagcacgatgccgtcttcttcacgcttgtagatcgcaccgctggggcacgacgccgcgcatgccgggttgaggcagtgctcgcacaggcgcggcaggtacatcatgaaagtgttttcgtactcgccgtagatatccgcctggatctggtcgaagttcttgtccttgcggcgcttggcgaactcggtgccgaggatttcctcccagttggggccccactcgattttctgcatgcgcttgcccgataccaccgagcgcggccgcgcggtcggttggtgctcgcccaacggcgcggtgtgcaggtgctggtaatcgaagtcgaacggctcgtagtagtcgtccaggctcggcaggtccgggttggcgaagatattcgccagcacgcggaacttgccgccgatacgcgggttgatgctgccgttggcgttacgcacccagccgcccttccacttgtcctggttttcccactccttggggtagccgatgccgggcttggattcgacgttgttgaaccaggcgtattccatgccttcgcggctggtccacacgttcttgcaggtgatcgagcaggtgtggcagccgatgcatttgtccaggttcagcaccatgccgatctgtgagcgaatcttcatctcagttctcctcgatatcggtcggcaatgggcgcggcaagtcatcgccggtggaaccatcgagccagtcgaccttggccatcttgcgcaccacgacgaactcgtcgcggttgcaaccgaccgtgccgtaatagttgaagccgtaggcctgctgggcgtagccgccaatcatgtgggtcggcttgagcaccacgcgggtcaccgagttgtggtggccgccacgggtcttggtggtctccgaaccgggcacgttcacgatgcgttcctgggcgtggtacatcatcaccatgccctccttgacccgctggctcaccaccgcacgggcggtgagcgcgccgttgacgttgaagcattcgatccagtcgttgtcctcaatgccggcgcgtttcgcgtcgatctccgagagccacacgatcggcccgccacggctcagggtgagcatcagcaggttgtcgctgtaggtgctgtggatgccccatttctggtgcggggtgatccagttcagcacgatctcggtctcgccattgctgcgcttgcccttcacgccttcgatggtgcgggtgttgaccggtggccggtagctcatcagctgttcgccgaaagcctgcatccacgggtggtcctggtagaactgctggcgaccggtgatggtgcgccatgggatgttttcatggacgttggtgtagccggcgttgtagctcacatggtcgtcttccaggcccgaccaggtggggctggagatgatcttgcgcggctgcgcctggatatcgcggaagcggatcgcttcgtgggccttgggcaacgccaggtggctgtggtcgatgccagtgaaggccgacagcgccgcccaggccttgaccgccacatggccgttggtttccggggccagggacaggatcacctcggccgcatcgatggccgtgtcgatcttcggccgaccgtggctgatgcccgcgtcgccttcgtgatggttcagctcgccgaggaaggccacctcgtcatcggtgttccagttgatgcccttgccaccgttgccgagtttttccagcaagggcccgagggaggtgaatttcttgtagatgttcgggtagtcacgctccaccaccgccatgttcggcgcgttcttgccgggtacaggcgccacaccggcgcttttccagtcggtgccgccgaacggctgggccagttcgccgacgctgtcgtgcagcaacggtacggtgaccaggtcctgctcgacgcccaggtgcccgaccgccatggccgaaaacgccttggcgatgcccttgtagatttcccagtcggaacgcgactcccacgccgggtcgatggccgccgacaacgggtggatgaacgggtgcatgtccgaggtgttcatgtcgtctttttcgtaccaggtggcggtcggcaagacgatgtcggagtacacgcaggtggacgacatgcggaagtccagggtggtcaccaggtcgagcttgccgatggcgccgtcgtcgacccattcggcttcggtgggcttgctttcgccgccaaagccgatgtcttcgttcatcacgccgttcttggtgccgagcaggtacttgagcatgtactcatggcccttgcccgacgaaccaagcaggttggaacgccagatgaacatgttgcgcgggaagttcaccgggctgtccggttgctcgcaggcaaagcgcaaggtgccgtcctgccaggccttgaccacgtagtctttgggctccataccagcagctgccgcgtcccggcagatatgcagcgggttggtgttgagctgcggcgcgctgggcaaccaaccggcgcgttcggcgcggatgttgtagtccagtgcatgggtggggaactgcgacttgtccgccatcggcgacaacacgtcgtgcatgttcattttttcgtggcgccactgcgagctgtggccgtagaagaagctggtgccgttcatctggcgtggcgggcggctccagtccaggccgaacgccaggggcagccagccgcattgcgggcgcagtttttcctggccgacatagtgggcccaaccgccgccggtctggccgacacaaccgcagagcatgagcatgttgatcagcccgcggtagttcatgtccatgtggtaccagtggttcatcgccgcgccgacgatgatcatcgagcggcccttggtcttgtcggcgttgtcggcgaactcacgggcgatctggatggctttctcgcggctgacgccggtgatcgcttcctgccaggccggggtgcccggcacgctggcgtcgtcgtagtcccgggccacgttgctgccgcccaggccacggtcgatggccaggttagcggcggacaggtcgaacaccgtggcgaccttggcaatactaccatcggccaacgtcacgctgtgcaccggcacgcggcggaactgtacggcgtcaccggccacgtgctggaagtgttcgtgggcttcaccggcaaagtacgggaagccgacttcggccacgtctgcgccgatcaggctgagcttgaggtcaatttcacggccttcaccgccctctttggcgaggatgttccacttgcccttctcgccccagcggtagccgatggacccttgtggcgacaccagttcgccgctctcgtcgagggcgatggttttccattccgggttgttgtcctggcccaggttgccggtgaggtccgaggcgcgcaggaagcggtcaggctggaagccagcgccgggggcaaacccggtcacgggcttgagcatcaccagcaccggcaggtcggtgaagcgcttggcgtagtcggtgaaataggcgctcgggtggtcgaggtgaaattccttgaagatcacatggttgaaggcctgggccaacgcggcgtcggtaccctgcttggggttgagccacaagtcggtgagcttggccacttccgagtagtcgggggtgatggccacggtcttggtgcccttgtagcgcacctcggtgaagaaatgcgcgtccggcgtacgggtctgcgggacgttggaaccccaggcaatgatgtagttggagttgtaccaatcggccgattccggcacgtcggtctgctcgccccacaccatcggcgaggccggtggcaggtcgcaataccagtcgtagaagctcaggcataccccgccgagcagggacaggtaacgcgagccggccgcgtagctgaccatcgacatggccgggatcggcgagaagccgacgatgcggtccggcccgtattgcttgatggtgtagacgttggaggcggcgatgatctcgttgacctccgcccagttggagcggatgaaaccgcccatgccgcgcttgctcttgtacgactcggccttggccttgtcctcgacaatgctcgcccaggcctccaccggggccatggtcaggcgcgcttcacgccacagcttgagcagcggcttgcggatcttcgggtacttgagccggttggcgctgtagatgtaccagctgtagctggcgccacgcgggcagccacggggttcatggttgggcaggtcgttgcgggtgcgcgggtagtcggtctgctgggtttcccaggtgatcaggccgttcttcacgtagatcttccacgagcacgagccggtgcagttcaccccgtgggtggagcgcacgatcttgtcgtactgccagcgcgaacggtagacgttttcccagtcgcgggactccttgcgggtctcgccgtggccctcggagaactcgtcttgcttgcggttgaagaaccgcagttgatccagtaagtgactcatggtgctttcctcatcaggcgtgccgtggggtgcgttgccccgcgaattcaggtcggactagcagggtgtggcgcagcccttgcgggcgtaccaccaccaggtcacgacgatgcagctcaggtagaaaccgacaaacatgtagaaggccatggccgggctgccggtggcggccatggaactgccgaaggatttagggatgaagaacgcgccgaatgcgcccatcgcagagctgaaccccagcaccgcagccgattccttgccggcgtccttcagggcctgttcacgcaccgcagcgggtttgccggcgctggccttctcgtgaagggtgcggaagatcaccgggatcatgcggaaggtcgagccgttgccgatgccggtggtgatgaagagcagcatgaacaggccgaggaagccgtagaagctgccgccctgcccgttctgcggcagaaagtgcagcacgccgaacaccatcacgatcatcagcacgaagttccacagggtcacccgcgcaccgcccagtttgtccgccagccagccgccgagcgggcgtaccagcgcgcccaccagcgggccgaggaaggcgaatttcagcgccaccacctcgggaaacgaggtcttgatcagcagcgggaacgccgccgaaaaaccgatgaatgaaccgaaggtcgcgaggtacaaccagcacatcagccagttgtgcttgcgtttgaagatcaccgcctggtcgctgaacgacgcacgggcgctggacaggtcattcatgccgaaccacgcggccacggtgacggtgaggatgaacggcacccagatgaaaccggcgttctgcagccatagctggctgccgtccgccagggtttgcggttgcccgcccatcaggccgaacaccccgaaggtaatcaccagcggcacgcagaactgcatcaccgacacgcccaggttacccaggccggcgttcaaacccagggcggtgccctgctgcgccttagggtagaaaaagctgatgttggacatgctcgaagcgaagttgccgccgccgaaaccgcagagcaacgcgatcaatacgaacacgctgtacggcgtgttggggtcctgcaccgcgaagcccatccacagcgacggcagcagcaacgacgcggtactcagggcggtccagcggcgcccgccgaagatcggcaccatgaacgagtagaacacccgcaacgtcgcgccagagaggcccggcagtgccgccagccagaacagctggtcggtggtgaagctgaagccgatggcgttgaggcgcacgatcaccgtgctccacaccatccacacggcaaaggccagcaacagcgcggggatcgagatccacaggttgcgggtggcggtcttcttgccgctggcgccccagaacgctgggtcttcggggcgccagtcatggatcaccgggcccgaggtgggcttttgcgcaatggacatgatcattctccttggagcgcgggcttgccgagcagcggttgtttgcggatttcgctgaagtacatccaggccagggacacccagaccacgccgtacatcaacatgaagcaggaagagcgcacgccagtgaggtccaccagggcgccgaacataatcggcagcacaaagccacccaggccaccggccaggccgacgatgccggacaccgcgcccatgttttgcggatagtcattggcgatgtacttgaacaccgaggccttgccgaacgcgaaggcgatgcccatcacgaacagcagcacggtgaacagcgcaggcgtgaggccgatgtggaaatccagcgggccgttgacggtcatcacctgcaactgggtctgcgggtagctgagcaggaacaggcacacccagctcacccacaacacccaccaggtcacgctctgcgcgccccagcggtcggacatccagccgcccacggcgcgcagcacaccacccggcagcgagaaacacgcggccagcagcgctgcgctttgcaggctgaaaccgtattcctgcacgtagtacttggtcacccacagcgccagcgccacatagccgccgaacacaatcgagtagtactgacagtagcgccacacggccgggtctttgaggcacagcaactgctggcgcaaggtggcgccgccggcgctgcggtgggccttgttttcgctggtgaggaaccagaacagcagcgcggtgataaacaggatcgcgctgaacaccttgggcaccaggtgccaggtgccgagggcgatcaagcccggcgcgagaaacttggtcaccgccgcccccgcattgccagcaccgaacacgcccatggcgaagccctggttgtgcttgtcgaaccatttggcgacgtaggcgatgcccaccgaaaacgagccgccggccaggccgacaaacaggcccagcaccaggaactgccagtaggcggtggcgtaggtgatcaggtacagcggcaacacgcaggcaagcatcagcaggaagaacacgatgcgcccgccgaaacggtcggtgagcaggcccagcggcaggcgtaccagggagccggtcaatacaggcgtggcggccagcaggccgaactgggtttcgttgagttgcagcagctccttgatgggcacgccgagcacggcgaacatcatccacaccataaagcagacggtgaaggccagggtgctcatgcccagcaccaggccttgtcttatacggggttgagtcacggtatgcgctccagaaagtgattccatgggcgcaggttaggggcggcacttgggtggaacttgacccaggtcaacgtccgccgggtaggtatggggctatgctcgccccgtctacctccaaggaggtagtcagcaaaacaagagaaagcctttatttatcaatggattgttctcttgtgccgggttttatccgtgggagggttcgccggcaattctttagaggtagtgcgccagggaaggccattgacaaccccctttcccgctccaggtgcgaccatgctgctctgccatccactccgtctgcgccgtcatgcttgactggctgcgcagttccctgcccgcccgtgccggcctggcggtgatcctcatcgcgatcctggccctggccagctccctcagtgccgggctgatcgcctggttcagccagggcgacgccgcggcgatcaacaccgcaggctcggtgcgcatggagacctaccacctcagctggaagctggcggccggcgcgcgcgcggatgaggtcgccgaggtcagccagagcctgcaacgccggctcgacagcccctcgctcagggcggcgctggaagacggcccgcaaagcgcgctgttgcagagttaccagcagatccgccaacgctgggacagcgaactgggcccggcggtgattcgcggtgatgccgacttgttccaggcccgcgcaccggcgttcgtcgagcaactgaaccagttcgtcagcctgttgcagcaacagagcgagcagaaacagagctggcagcaaggcattcagggcctggcgttgttcagcaccttgatcatcctgttgctcggcctgtacgagttgcagtacggcgtggtcaacccgctggaagaactggtgcacgccacccggcgttttcgcgacggcgacttcaagacccgggtcaaccaccgttccgaggacgaactgggccaactggcgctgagcttcaacgccatggccgagaccatcgaggcctcccaccgcactctggaaacccaggtgcaactcaagaccctcaacctgcaacaagccaacgccgccctcgaattgctctaccagagcagtcgcagcctggccacgcgcctggccaatgccgagggcctggatgaactgatccggcgcttccagaaacgcctgccgggcctgcgtctgtcgctgtgcctgcaaggtcacttcctcgcccccgcccagcagatgctggccctgcacggcgagaacagccgcaacgtgtgcgccatcggcgactgtgccacctgccagaagcacaaggccgcaccgccgcaggtgttcagcatcagcaaccagggcacggaactgggcgaactcaaggcgcacttcgtcgatggccacccgccccaggactgggaaaaacaactgatccaggccctggccaacctgatcggcacctcactgtcgctcaagcgccagcgcgagcaggaccaccgcctgttgctgctggacgagcgcaccatcatcgcccgcgaactgcacgattccctggcccaggcgttgtcctacatgaagctgcaagtgagccgcatgcaaaccctgatccgccgtggcgagccagtcgaaaccctggccaccgtcaccagcgaactgcgcgatggcctcaacaacgcctaccggcaactgcgcgaattgctcaccaccttccgcctgcagatccacgatgccgggctggtgcaggagctgcaggacaccgccgaagaattctcccggcgcggcgaattccaggtgcacttgcacgtggacgccctggccttccagctgtcggccagcgagcagattcacatgttgcagatcacccgcgaagcgctgtccaactgcctgcgccacgcccatgcacagaatgcctggctgcaactgcgccaggtcggcgagaccgtgagcttgagcatcgaagacgatggccggggtttctgcggcgccgtcgaccagcgcgaacaccacggcctgaccatcatggacgaacgcgcccgcagcctgcacggccagcttgagatcagcccacgcgagccccagggcacccgcgtgcaattacgtttccagccggaattcctcggccacaccctacaaggcagcacctcatgaacgtccctcttcgccaccggatcctgttggtcgacgaccacccgatgatgcgccacggcatgcgccagatcctcgaactggaagacgacctgcacgtggtcggcgaggccggcaacggtcaggaagccctcgaccagatcgccagcctgcaaccggacctggtactgctggacaacaacatgccgcacatgaacggcctggaaaccctgcgccgcctgcgggccatggactacgcgggcaaggtgttgctgtttaccgtgtccgacgctgaagacgatattcgcgatgccctgcgcctggatgccaatgggtatctgctcaaggacatggaaccggaattggtggtcgagtttatccgtgatgcgttgcatggcgcgttggtgatcagcccaggcttgaccagggtcttggcccaggcgttgcgctcgccgcagccccatgcggcggtggaattgactgatcgggagcggcaggtgttgaagacgattgccagtggctacagcaacaaggtgatagggcataagttggggattaccgaggggacggtgaaggtgcatgtgaagaatttgctgcataagctggggttgaggtcgcgggtggaggctgcggtttgggcgatggagcacctccggcaggtggggtgagcttttgaccgggtgtatatccattatttaggtgatggctgatatgggttccgcccttacggcggctcactttggaaaagccggaatgccggcccagcccaaagtaagcaaagggctcttgccccaacactcggcacctcgcctaggctcggtgtgcccgtaattcgacagtgatttggggggccgcctaagatcaaaatcaaaagcagatctaaagccagagccagagcaacagccacagccacaaccagagccagagccagagccagagccagagccagagccagagccagagccagagccagagccagagccagagccagagccagagccagagcaaaccacccttcaactgatacatgaagatcaaactgtgggagggggcttgcccccgatggcggtgtgtcagccaactcat

SEQ ID NO: 43 - DNA, 12202 bp, Pseudomonas nodulensis
cggtgtgtcagccaactcatcagtgactgacccactgccatcgggggcaagccccctcccacactttgaccgagtacgggccattcaatccggtcggctctaaggccgccgcgctcttgatcttgatctggggcgccccgtcaaacacgctggccgaacgcaggcttgaatccgtgggtaacccggcaggacgccgggttagccgtcctgggccaaggatggcccatgacggcggcccacggattcaagccggagtgagggaacaccgagcctaggcgaggtgccgagtgttggggcaagagcgttttgcttacttttgcgctcttcaaaagtgagccgccgtaagggcggaaccataggtggccgttaccgaagaaatggatatgcccaccgagcccccccccccaacgagtcatatcccaaaccccggcgccgcagatagcgtcaggtcgcaagcccccgccccgcccgctccagattgcgccacaaccagggcggtaagacatccgggtcaaggctgtcgatcaggttcttcaagcccaaccccagctccgtatccccttcgatcaccaggcgccgccggaagaacaacgtatccgggtcttcctgccgactggccagcaacaagaactcgcgccaattgccgctgatggtcacttgggcctgcgccttctgcgcaatccgcaacccatcccgcgtcaacgtcaggtaccagcacaagcccaggtccggaatgcgcaggcacatccagcgtccgcgcagcaggtcaaaaccgtcgtcgcgcagcggctcggccaggcagcggttgagcccctgttgcaacgccaggcgctgcaccgcgaaaggcacacggcgaatcagcgacaatacccggtcagcacccttgagcaaccattgcttgcgattcaacacaaccccacctcctcgacccgcaacatgccggcctgcccatgccagtaaccgttgcagccactcaccagcaacggcggcgtggcaccctggcgcacctggtcgaaggcacgcaccacctcggccatgccttcggcccgtgggctcaggcgcaacaggtcggcgccacaggcgaccaagccgggatagtcagccagcaagttggtcacctcggcggacatcgtctgaatcccattcaaggtaaacagcgcctgcccttcctggctggtcaacgccatgccatccgggtagttgatgcagcaaaactggcagtcgtccttgggacgattctccgcacgggcggtgaagcagcgcgccgagtacgctaggggcaaatggccgtaggcgaagatctccacttcgggcagcggccgtcccagttcgcggacctgctccagcacatcggcgatcaagccgtgggagcattccaccggcggcacccagcgctgcatgcccgcgtcgagcagctgcaccagcgcgtggccgttgtagaggttgagcgccgggccaccgacaaagggcactttgcgctcgatcagcaactgcacggcgcccatgtcgttggcctccaccagcaactcgccgttgtcgcacaggcggcgcaggctggagagttcggacgcggcttcgatcagggtgaggctcgacagcacgatctgcgccgggctgcacgcctgcaactcacggcccaggcccagccattgatccaggttcagcgcgcggcgtttggcgcacacggtttcccccaggtaaatcacgtccaggggcaaggcggccatgtcggcgtagaagcgccccaactcttgcttgtcccaataaaacagcaccggtcccaggctgagtttcatcgatgtgtcctcattgccatgcacgatggtaagcccccagggtggtctggctgccttcggaaagcccggcaagcacctggcgccattggtccttgaccacgaaatgggccgggctgctgcggtgcgcgtcgagggcggcgcgccacacgcgggtgacttgctccacataggccgggctgcgttgccggccttcgatcttcaccgcttccacgccgatcgcactgagttcgggcagcaggtccagggtgtcgaggctggtgggttcttccagcgcatggaagcgcttgccgcccaccaggaaacggcccttgcacagggtcgggtagccggcgggttcgtccggggtgtagcggtcgatcagcacttcgctcaggcgtgcgctgaggccatcggcatcctcgctccagcgcaccgccttggccggcgaacacacgccgcacaggttgggtgattcacccgtgatgtaggaggacagatggcaacgcccttcggccatgatgcacaggctgccaaaaccgaacacctcgatgggcaccgtgccgctggccgccacctgcttgacctgcgccaacgacaacacccgtggcagcacggcgcgccggataccgtagcgctccacatagaatttcaacgccgccgcgtgggtggccgagccctgcaccgacaggtgcaacgccagctgtggatgatggtgcgcggcatagccaagcacaccggggtcaccagcgatcagcgcgtcgacgccatggtcggcggcgcggtccacggcgcgctgccaacgcgaccagatcttcggctgcgggtaggtgttgaccgccacgtagagcttgcgctggtgctggcggatatgggcgacggcggcgtcgaactgcttgtcgtccatgttcagcccggcgaaatgccgggcattggtgtcatcgcgaaaacccacgtacaccgcgtcggcgccttggcgtacggcggctttcagcgcaggcaggttgcctgccgggcagaccagttgcatggtggctccttattgaaaatcggcaaacggcaggaacggcacggcggcgcccttgagcacctgctgctcgcgctcgacgatcaccagcccatcggcccagcaggcggcggcgagcatcgccgagctttgctgggggtgcaggattgcgcgcagctgcccatcgctgtcggggctcaagcgcgcacgcaggtactggcggcgcttgttgggtttgagccactcgaaggccgccggcacgctgacaggcaccggcaacacgcgctccacgccttgggcgcgcagcaggaacgggcgcaccacgatcagcgtggtgaccagcgcggcggtggggttgcccggcaggccgatccagggtttgccggccacttggccgaacgccaggggtttgccgggctggatcgccaggcgccagaactcgaccttgccgagtgcctggatcgcttgtttgagatggtcctcttcacccaccgacacgccaccggtggtcagcagcaggtcgcactcggacgaggccagcaccaacgcatcgcggctggccgccagcgcgtcggccatcacgccgtagtcgtgcacctccacgccccagccacgcagcaacgccgctacgaggtagcgattgctgttgtagatctgccccggcgccagcgactcgcccggctcacgcagttcatcgccactgctgagcaggcacacgcgcagtggccggtagaccttgacccggggaatgcccgccgccgccaacaggccgagttcctgggcgcgcaggcgtttgccggcgctcagtacccgttgcccgcgttgcagctcttcgccgcgcttgcgaacgtgttcgcccaggcgcaacggcgggcaccagatgcgctggccatacacccggcagcgctcctgcggcaccacgctgtcggcacccggcggcagcggcgcgccggtgaagatgcgcacggcttgcccgggctgcaacggcacatccgtgctgtgcccggcggcgatccgcccgaccacttccaggtaaccgccctgctccggcacgtcaaacgcgcgcagggcgtagccgtccatggcgctgttgtcccagcccggcaggtcacggggcgagaacacctcttcggcggtcacccgccccagggcatcggccaacgcaagcatttcggtggacggtggcggcggtgcctgggccagcaactgctcgatggcctcttccacgggcagcaggtcgccgctgtcgcagggactcatgagcgtgcctcacaagcagcgagtatctgatcgagttgcggcttgaggtgcggcgcaaaattgcacgggccggtgcggctgtccaactgaccaaccaggatctggtcccaggcagtacgacaggcccccggcgaaccgggcatgcagcacaccagcacgccgttgctgaaaccggccagggctcgggattgcagggtcgacatgccgatttccgccagcgatacctggcggaacaactcgccaaagccgtccacctgtttgtccagcaacggcaacaccgcctgaggggtgttgtcgcgcgcggtgaaaccggtgccaccggtcatcagcaccacttgcacctgggggtcggcgatccattgcgagacgcgcgcgcggatctggtagatgtcatccatcacgatgccacggtcgatcagcatgtggccggcacgttgcaggcggtccaccagggtgtcgccggaggtgtcggtgtcgtaggtgcgggtgtcgctgatggtcagcaccgcgatgttcagggaaacgaaactgcgttgggtcagatgggccatgatccaggctccaggcgttgaaaagatgcatccagcctgcgccgcatcgggcgcagggcctattcctcgaaggaggtatgccgtcagggggccaggcgcgtgcgctgccacccggcgtcatgcaggcgatagtcaagacggtcgtgcaagcggtccggccggccttgccagaactcgatacgttggggttgcaggcagtagccgccccagtgctcgggccggggcggctggcgcccggcaaaccgctcggtgacctcgcgcaggcgcccttccaactcactgcgatgggccagaggctggctctggggcgaggcccaactgcccaactgactggcgaccgggcgggcatcaaaatagtcgtccgacagctcggcatccgccttcgccaccggcccttcgatacgcacctggcgctccaggcccggccagaagaacgtcatggcggcatgggggttgtccgccagttcatggcccttggcgctctggtaattgccaaagaagaaaaacccgtcggcgctgaagcccttgagcagcaggatgcggcagtgggcatgcccctggccgtccaccgtggccagggccatgctgttggcctcggcgggcggcacttcggtcttgcgggcctgctccagccactggccgaacagctccagcgggtcggcctgcgggcagtcatcgcgcaggccgtagagggtgtagttgcggcgcaattgcgcaagggacaggggcatggggcggtcctccaggaagttcgccacagtgtgagaactggcgcgccgccgtcccttgaccgtgatcaacaatcgcccgcggcatgacgccgcatgccgcttaccacaacgacttggcgatgatcacaatcagcaccatgtgcaggaggatactgcgccgaatccaccgtgcacgcttggcgctcaggcgctgtttacccagccagtacgccagcagcaggtagtgcccgatgatgctcagggccagcaggactttcaggctcagcagccacgcaaaacgaccactccacggcatgccccagtagtgccaggccagccccagtcccgcgccgtacagcacgatgaccaccagatgcagcacgcgtcgcgagcgccgggcaatcgcctggtcgcaggtgaactgcgcggaccaggccaactcctcccgggcgctgtgccagatcaccacttcaaaaaacaacgtgccgatgaacgcgatggccgccagcagatgaaccatcaatagcactgaatacatggatctctcctaacccggatgcccgtccacacgcgcccgccacagcatcggcccgtagcgccacaggtacagccccagcccgatggaccagcacagcgccgccaaccacaatgccgccaccggccacaccagcaccgccagcacccggcacacacacgccaggttcagcaacgcaaaggccagagtcatccccgagggcggctgcaatggccggccggtatggcccaggctgacccgcgcgatcatcgccaggatcaacccggccatggcgccgatggtcagcgcatgcaccgccaggctcgggttgagcggcgcgccaaaatgccacagcgccatgcccaggcacgccagcgccaaccaggcataggccaggtgcagggaccacagcagcggcacccgccacaggccgcgagcatgccaacgcgccaggcgcaacagatggcccacgcccagcagcgcgaacagcacaccgatccaggcccgtggcaacaaggccaccccaccggcatacaacaacgctaccagcaccgaaccgcccaacagcaggtgatccaaccacggccagggcttgaccgccgcaacccgacccaggccgcgttgggtgaaaaacgggatcacccgtccgccgatcagccccatcatcgccgccaccaaccagaggccggtcaacactgcctggcgctgcaagccctggtcatacagtgccaagccatcagccaccgccagcaataccagcaccagcacaatcggataattgcgcgtctgtcgcacctgccacagcgtccatcccatcacgcccgccaccgccagtgggaagctcagttccagtaccgccagcaatggcaggggaacgttgagcaaccagcccacgcgcgccgccagccacagcgccgcgagtgcgcccaagggtgccccgctgagcccgggacgaccggtccaggtctgcaccgccgtcagcagaaaaccggcgatgatcgccaggccaaagccgaacagcagttcatgccgatgccaggccagccagccgccggccggttgccaactgccggtcatgccgcccagggccagcagccacagcggcaccgccagcgcggccaacaggcaggcaccgaggaaaaacggccgaaaggccaggcgaaacaacggggtaatcgacatggccttgcgtcgatccagtacgtgcatggcagggctcctgaatgtatcactgcgccgatggtgcacctgtacgcgcgtcttgcccttgtcgcagatcaagctgcgccaagggcaaccggattaacctcgacgcccctttccctttgtgccccgaggtaatgatggtgctccatcgtgtccatcaccagatcctgcgcagtcatcacctgttcgagcccatggacgagctccaactcaacgagctgatgagcagcagccagttgctcagcgtcgacaagggccagcccctgttccgccagggcgaaccggcggacgccttctacttcgtgattgccggtgcggtgaagatctaccgcttgaccccggacggccaggaaaaggtcttcgaagtggtcggcgagcgccgcaccttcgccgaagcgatgatgctgatggatacgcccaactatgtggcgtgcgccgaagccgtgtgcccgacccagttgtaccggctgtccaacgccacctacatgcgcctgctgcacagcaacagccgcctgaccttcgccctgctcggcacgctgtgcgtgcgcctgcaccagcgggtcaacgagatcgagaccctgtcgttgaagaacgccacccaccgcgtggtgcgctacctgatgacccagttgatgcgcctgccggtcggcgaaaaccgcttcgaactgcccatggccaaacagttgatcgccgggcacttgtcgatccagccggagacgttctcgcggattatccggcgcttgatcgacgaacagatcatcacccaggacgctcgccagatcgcgattctcgaccgcctgcgcctggagcaattcgagtgaggacctgcctgtattgccagcaccgcaatgccgtgcagcgcgacacctgcgagcactgcgccatgccgctgccgagcgccgaggccggccaccaggcgcggcggctcagccgtttccagtggttctgcgtgggcctcgcgttgttctgcatcgcgatgtttttctggctgccccgtgatatctactgaccctcggtgagttgtcggtacagctgcggcaaacgctcgggcaactgctgcggctggcggatcagcgtgaagccatgggcgccgaacatgtacggcaggtagtcgccggcctgcttgtcgatggtgatgcagaacggcaccaggccttggcgcctcgcctccagcaccgcctggcgagtgtcttccacaccgtagcggccctcgtagaggtccaggtcattgggcttgccatcggtgagcagcaacagcagtttgcgccgttgcttgcgggcgcttagcaggtgggtggcctggcgaatcgcggcgcccatgcgcgtgtagtaacccggcttgagggcctggatcaccccgcgtgtgcggtcatcgtaggggtgctggaacggtttgatcacctgcaggcgtacctgctgccgacgcagggacgagaacccatacagcgcaaagcggtcccctgcccctgccaggctttcgccgaacagcaacaggctgtcgcggatcacgtcgatgaccttttgcgtgtcgttcagatgggcgtcggtggacatcgacaggtctgccagcagcaggcaggccaggtcgcggtgggtatggcgctgctgcatgaacagcccgcgttcggcacaggcgccgtgctggcgctccacatgaaagtccagccaggcctgcaggtcgagttcgctgccctgggactgctggcgttgccattgacgctcggtgcgcaggtgctggaactggcgccgcaggcgttgggcctgggcgtgcaggcgcgcgggcagcgcttggggttgatcggcgcgtggttgcatcagttgcaggttgacgaaggcgtcctgcaagcattgccggcggtagtcccattcgggcagcttgatgccctcgccgagggggatgtcgtcgacatcggcgggcggcaggtccaggtgcagtttcagcccgccactcttgcgcacgcgctggcgcgacaggctcaggtggtcgaggtcttcggcgacgcgggcggcgtcggggtcctggctgtcgtcggtccagcggtcaagctcgacgtgctcggtccagctgaacaggttttccaggcgcaccaccagcaggccgccgtcgcgggcctggtcatccaggcgtgtggcgcgcttgggcgggccttgttgtgcgcccggcggcgccgacaggtcgtcaccttcgtcgtcgaggtcggcgctgtgcggtgcgtccagctgctgcggtgggtacagccataacggcaatggccacggggcgcgctcgctgcgcggcagttggcgcacgctaccgggttcgcgcagggccttgcacaaggctttttccagggctgcttcgtcgggtttgaggcccgccgggtcggggcgcaattccagatgggcatgcaccagccggcgataacggggcagcatcgccgggtagcgttgcagcaacagccaggtccagcgttgattgtcgcgggcccagtgggtcatggggccggcgtgggcggcgagcaatgccagccattggtacaagtcggcattcagcgccgggtcgggaaatactgccaggctgatcggcaagcgcaggcggttgccgtcacaggtggccagcggtgcctgtttgcaggtaccggcgatgcgcatcagcaggttgcgccgcagcaacaggtcgcgctcacaggccgcctccacggcgatgccgcccgccccaccgagggctcggaacagcagcgccacacggcgttgatggtcggccagggcaacccgcgcttcggggaaatccacactggcgcggcgtgtgataaagcggtgccaggcactgccgacccattcttcgagttccagggtaaaggccatgtcattgctccaaacgtaaaacggcccgctgtaccagccgggccgccctcttggggattaacgttgttgtctatacggcggggaccggctcaccgatcaccccgcgccgttgccggaagctgtacaggtagcagagcagccccagcaggaacaccacgccgctggccaaccgtgcccagaacagcgtattcaggtgctccaccgtggccatgaacggcagcgccacaccgtccaccggccagcgctgcaaccacacctgcacggcgccggcggcggtgaggaacagggtgatcatcaccatcgacaccaccatcagccagaagccccatacctcgatggtctgcgaacgcgcatccggcgcttcaccgaggccacgcaggcgcggcatggcgtagctgatcagggtcatcacgatcatcgcgtaggcgccgaagaacgccaggtgcccgtgggcagccgtgagctgggtgccatgggtgtagaagttgaccggggccagggtgtgcaggaaaccccagaccccggcgccgaagaacgccgtcaccgtggtgcccttggcccacaacgtcgccgcccggttcgggtgctggcgccgacggcgtttgaccatggtgaaggcgaacatcaccatcgccaggaacggcagcggttccagggccgagaagatcgaaccgacccacaaccacacctgcggcgcaccgatccagaagaagtggtgcccggtgccgatgatcccggtgatcaacgccatggcgatgatcacgtacagccatttctccaccacctcgcggtcgacgccggtgaccttgatcagcacgaacgccagcatcgagcccatgatcaattcccacacgccttccacccacaggtgcaccacccaccaccagtagaacttgtcccgcgcgaggttcccggggttgtagaaggagaacaggaagaacaccgccaggccgatcagcccggtcatcatcaccatgctcaccgtggtcttgcggcccttgagcagggtcatgccgatgttgtacagaaagcccaggcacaccaccacgatgcccatcttggtgatggtgggttgctcgaggaactcacggcccatggtcggcagcagttcgttatgggtcaatttcgccagcgcggcgtacggcaccagcaagtagccgaggatggtcagcacgccggccacggcgaatacccagaacaacaggatcgccagtttcgggctgtgcagctcgcggtccgcctcctcgggcaccaggtaatacgccgcgcccatgaagccgaacagcagccacacgatcaacaggttggtgtgcaccatccgcgccacgttgaacgggatcagcgggaacagaaagtcgcccaccacgtattgcaggcccatgatcagcccgaacagcacctggccgacaaacagcatcagcgcaaacacaaagtagggtttggccacggcctgggattggaatttcagatagggattggcgctgcgcatggctcagccctccttgttcggtggccagttgttggtgtcgatcttcgagctccatttgaggaactcggacagatcgttcacctcctggtcattgaggttgaattgcggcatggcccgacgccccgggacgcccagcggttgcatcttcatccaggcgtgcaggaacggcttgaacccttcttcaccgccccggcgctggaacacattgcccagctccggcgcaaagtaggcgccctcgcccaacagcgtgtggcagccgacgcagttattgcgctcccacacgcccttgccacgcaccaccgactcggtgagctggtcggcgttgctgcggacgggaaaggtctgttcggtgtgataggtcagggccaggaaaatcaggaagaagaacacgcttcctccgaagtagatattcctggccatgcccttggtgaaggtctctgacatggtcgtcttcctcatggcttggcgggggccatgataggaaggtggggttgggaaactgcttgatggcgatcaagaaagcctgatcggatgactgggtacatatccgttgctgcggtaatggccacttatggttccgctcttacagcggctcactttggaaaagccggaatgccggcccagcccaaagtaagcaaagggctcttgccccaaacactcggcacctcgcctaggctcggtgttccctcactccggccagcgtgtttgacggggcgaccccagatcaaaagcaagagcgcggcggccttagagccgaccggattgtatggccggtactcggtcaaagtgtgggagggggcttgcccccgatggcagtgggtcagtcactgatgagttggctgatacaccg

SEQ ID NO: 44 - DNA, 76969 bp, Pseudomonas nodulensis
  misc_feature (42160)..(42234): n is a, c, g, or t
  misc_feature (53351)..(53351): n is a, c, g, or t
aatcactgtcgaattacgggcacaccgagcctaagcgaggtgccgagtgttggggcaagagcgttttgcttacttttgcgctctatcaaaagtgagccgccgtaagggcggaaccaataccagccatcacccaaataacggatatgcccccagacttaaaccaacacccccacacacccgaccaccacccaagcccaccccaacaccccccaccgccacccccaaggcgcatcccgcaattccatgaacccatccgcaatcaaccacgacttgccaaccgccaacagcaacaccccccacccaccagcgccccccgccaacaccgtccccacactcaacaaaaccagcaccacccaacacaccatcaacccctgcgacgcactcatccgctcctacctcatcacatacaccaccggaaacaacaccacccacaccaggtccaccatgtgccaatacagcacccccgactccaccccattcaccgccaccccaccccgccagcacaccaacgccagccacccaaggatcagcatgcccagcagcacatgcaggaagtgaaaccccgtcagcacccagtaaagggtgaaaaaccggctgtactccatctccaaccccacctccaccagatgggtgtactcgccaagcttgatccccacgtataccagcgccaccagcagcgccgcgccaaacagtccggcgctgcgctgccaatgtcccaggcgcacctgctgcaaggccaacgccgcgagcagcccggtcgtcaacaggctcacggtcatcgccagcccgctggaggtgtccagttgtgcgcggcccgaggcaaacaccacgggttccaggcgctgggtcacggcgaatgccaggatcagcatcgcgaacacggtcaattcggcgaggatgaaaaaccacatcgccaggtcacccggcaggcgccggggctcaggcaaagtgcacatccaccacgtccatcagcccggcgacggtctgcgggtcgtcgctcagggcctgggccaggcaagccatgcaggcttcacgcgggggcatgccggcggcgatcaggcgggcggtgaagatcagcagacgggtggaggcgacttcttccaggtcgtgttgatccaggcgccgcaacgcctggcccaggcgtaccacctcagtggccaacgcgttatccacctgcgcctcccgggccacgatgcgcgcttcgtccgccgccgccgggtagtcgaagcgcatcgccacgaagcgttgacgggtgctgggcttcatgcccttgagcaggttctggtagccggggttgtacgacaccaccagcatgaacgacggcggtgccttgaccacttcgccggtgcgttccaggtacagctcgcggcggtcgtcggccaccgggtgcaggaccaccgcagtgtcctggcgcgcttcgatgacttcgtccaggtagcagatgccgccttcgcgcacggcgcgggtcagcgggccgtcctgccaccaggtgccctgggcgccgatcaggtggcggccgaccaggtcggcagcgctgaggtcgtcatggcaggccacggtgtacagcggcaggttcaggcggtgcgccatgtgctgtacaaagcgggtcttgccgcagccggtcggacccttgatcagcaccggcatgcggtgacgccaggcgtgctcgaacagtacctgttcgttggcgaggggttggtagaagggtgtggtcatggccggtatccaaagcgggttcgacagccacgctaagggcgcctgcgacaacctggcaagcgctacccaaggcaaacttgatcgccgtcaagcgagcattccaacacgtcgccatagtctggccgggcactaagaacctgcgccccgcacctgttgcgtggcatcgcaaaggtctcgcctgaggagtacatggaatgctgactcgcacccgcaaaaccttcaccctgagcctcgccagcctgagctgcgcgctggccctggcaatgcccccgacggcccatggcgccgcgcaacccgcgctggtgaaaactgccggcgcaccggacatgagccaggccgacttcgacacctccaagcagatttacttcgaacgctgcgccggctgccacggtgtactgcgcaaaggcgccaccggcaaaccgctgaccccggacatcacccaggcgcgtggccaggcgtacctcgaagcgctgatcacctacggctcccccgccggcatgccgaactggggcacctccaatgcgctgaccaaggcgcagatcagcagcatggccaccttcatccagcacaccgcgcccacaccgccggaatggggcatggccgaaaccctcaagacctggaaggtgctggtcaagcccgaagaccggccaaagaaacagctcaaccagctcaacctggacaacctgttttcagtgaccctgcgcgatgacggcaagatcgccctggtcgatggcgacagcaaaaagatcgtcaagctgatcgacaccggctacgccgtgcacatctcgcggatctccgcctcgggccgctacctgctggtgatcggccgtgacgccaagatcgacatgatcgacctgtggcccgccgagccaaccaaggtcgccgagatcaaggtgggcatcgaggcgcgctcggtggagacgtccaagttcaagggttacgaagacaagtacaccatcgccggctcctactggccgccgcagttcaccctgatggatggcgaaaccctggagcccaggcagatcgtatccacccgtggcatgaccgtggacaagcaggagtaccaccccgaaccacgcgtggcggcgatcattgcgtcccacgaatggccggagttcatcgtcaacgtcaaggaaaccggcaaggtgatgctggtcaattaccaggacatcaagaacctcaccatcaccaccatcgacgccgcaccgttcctgcatgacggcggctgggacagcacccaccgctacttcctcacggcggccaacaactcgaacaaggtggcggtgatcgactccaaggagcgcaccctcaccgccctggtggacgtgggcaagaccccgcaccccgggcgcggcgccaacttcgtgcacccacagttcgggccggtgtgggccaccagccacctgggggacggcggcatttcggtgatcggcactgacccggtcaagcacgcgcagtacgcctggaagcaagtggcttcgttgaagggccagggcggcggttcgctgtttatcaagacccaccccaactcccaccacctgtacgtggacaccacgctcaaccccgacgccaagctcagccagtcggtggcggtgttcgatatcaaccacctcgacaagggctacagcgtactgccgattgccgagtactccggcatcaagcaaggcgcgctgcgcgtggtgcaaccggaatacaacaaggccggcgacgaggtgtggttctcggtgtggaacggccagaccgaagagtcggcgctggtggtgatcgacgacaagaccttgaagctcaagcaggtgatcaaggacaagcgcctgatcaccccgaccggcaagttcaacgtgttcaacacccaacacgatatttattgagcccaatcaacaagaggtccgccaatgaaaaatattctcctcgcactgctggcaaccgccgctgcgttcagcctgcaaccggcgctggcgcaagacgggccggccctgttcaagagcaagccctgcgcggcctgtcatgccgtcgacagcaagctggtggggccggccttgaaggatgtcgcagccaagaatgccggtgtgaaagacgccgccaccaccctggccagccatatcaagaacggcacccagggtaactgggggccgatcccgatgccgccgaaccaggtcacggatgacgaagccaaggtcttggccgagtgggtcctgaccctgaaataaccgccaaggagcgcgccatgaaagtctcgatgatcagttcggccatggcgctgcttctactcattcccatgcccgcaggcgcagtcgtggatgcccaacgattggaacatctgctgacccaggactgcggcgcctgccacggcctgtacctcaccggcggcctcggcccgccgctgacaccccaggccctcgccggccagagccgtgacagcctgatcgccaccgtcacccatggccgcccagcccgtgcgatgccgggctgggcgccgctgctcagcgcgagtgaaatcgcctggctggtcgaccgactcctgcaaggaagccccaccccatgatccgtcccaccctgttagccgcttgcctattgctgggcgcctgtacccaaccgacgttgcgcggcaccggcgacctgggcctggtgatcgaacgtaccagcgccagcgtacaaatcatcgaatccaccggcatgagcaccctggcgcgcatcgaaggcctgggcgatctgtcccatgcctcggtggtgttctcccgcgaccagcgccatgcctatgtatttggccgcgacggcgggctgaccaaggtcgacctgctgggccagcgcatcgaaaagcgcatcctccagggcggcaacagcatcggcggcgcgatcagccaggatgggcgcctgatcgccgtgtccaactacctgcccggcggggtcaaggtgttcgatgccgtcaccctggcccaggtggcggacattcccgccaccgccctcgccgatggcaagcgctcccgcgtggtaggcctggtggacgcgcccggccagcgcttcgtgttcagcctgttcgacaccggcgagatctggagcgcggacttcagccagggcaacgcgccacgcatcagccgtttcaccggcatcggcgagcagccctacgacgccctggtcaccgccgatggccgctattacatggccggcctgttcggtgaagacggcatggcccagctcgacctgtggcacccggaacacggcgtcaagcgcgtgcttgccgactatggccgtggccagaaaaaactgccggtgtacaagatgccccacctcgaaggctgggccgtggccgacaaccaggcctttgtgccggccgtgggccgtcaccaggtgctggtgatggatgcccgcagttggcagcagaccgctgccatcgccgtggccggccagccgatctttgtcaccgcgcggcccgatgggcgccagctgtgggtcaacttcgcctacccggacaacgaccgggtgcaggtgctcgacagtgaaacccaccagatcatcgccgacctgcgccccggccccggcgtgctgcacatggagttcaccgggcgtggcgaccagctgtggctgtcggtgcgcgacggtgaacaggtgcaggtgtgggacccgtatcgcctgaccttgctcaagaccctgccggccttgagccccagcgggattttcttcagcaaccgtgcgcaaaaaatggggtattgaaatggaccttgacctgctcagccgtcgactgatcgaccgttaccagcacggcatgccgctgtgcgccgaaccgtaccgggagatggcccgggtgctcgactgcactgaagccgaactgatggcctgcctgcaacgcctggaactggcgggtgccttgtcgcgcatcggcccggtgttcgaacacacccgcgccggcgccagcaccctggccgcactggcggtgccgatcgagcgcctggaacaggtggcgcagcgcgtcagccagtacccggaggtcaaccacaactacgcacgcgaacaccactacaacctgtggttcgtgctgaccggcccgcaccgccagcacttggaacaggtgctggcggaactggagaaagacaccggcctgccgcccctggacctgccgatgctcaccgcctaccgcatcgacctggggtttgccctgggagaacatccgtgatcacgccgctgaaccacgaacagatgctcgacctgcgccaatgcctggagcgcggcctgccccaggttacgcggccgtatgaggagttggcggagctgatcggcgcccatcacgaccaggtgttgcagcagatgcagcaatggcacgagcaaggcctgttccgacgggtcggcctggtgctcaaccaccgtgccctgggctttgtcgccaacgccatgctggtgctcgacgtgccggacgcgctggtggacgaagtgggcacgcgcctgggccgcgccgtcgggatcaacctgtgctaccagcgcccccggcgtttgccgcaatggcgctacaacctgttctgcatggtccatggccgtgaacgcgaagccgtgaccgcgcatatccaggcggtgttgcaacaacagcagctcagcgacctgccccaccaactgctgttcagcacccgcgcctacaaacaatgcggcggacgtttcgcaccgccgccgtcacaggtatgggcccatggatgatctcgatcgccaactgatcaatcgcctgcaacgcggcctgccgctggtgcgccagccgtggcagcaactggcgcaggaactgcacagccgcccctgcgagttgctcgaccacctgcatgacctgctcgaagacgacgtgctgacccgcttcggtccgatgttcgacatcgagcgcctcggcggcgccttcaccctcgctgcgttggcggtgcccgaagcccgcttcgaagcggtggctgcgcaagtcaacgcgctggcgcaagtggctcacaactaccgccgcgaataccactggaacatgtggttcgtgctggcctgcgccaccgaggcggagctggccgccaccctgtcccgcatcgaagccctcaccgggttggcggtgctcaatctgccgaaggagcaaacctaccatgtcggtgtgtatttcccggtctgacaacgccctggccctgcgcttgatcgccctgacccaaagcggcctgccgctggtggaggacccgtgggcgtggctggccgagcaattgggcatcagcgtcgaatcgaccctggacctgctcaagcgcttgcaggctgaaggtgcgatccggcgcatcgctgcggtgcccaaccactaccgcctgggctatcgacacaacggcatgaccgtgtgggatgtagtcgacgagcagatgccgcgcctgggcgaactgatcggtgcgcagcccttcgtcagccactgctaccgccgaccacgccgacccggttggccctacaacctgttcgccatggtgcatgggcgcagccgcgaagaaatcgacagctaccgtgagcacctgcgttacctgctgggtgaagcctgtggtgctgacgaaatgctggtgagcagccgcatcctgaaaaaaaccggcctgcgcctggccccctcgcactagaaggagtgccctatgctgcggatcagtcagtacttgcgtaccctcgccggccgctgcccgccgccgcgtgtgtctacacccggcagcgaccgcccgccggtggtgatctggaacctgctcaggcgttgcaacctcacctgcaaacactgctacgccaccagcgccgacagcgtgtttcgcgacgagctggacaccgaggcagccctgctggtgatcgatgatttgcacgcggcgggcgtgcgcgtgctgatcctgtcgggcggtgaaccgctgctgcgcgaggacctgttccagctcagcgcctatgcgcgtgacaagggctttttcgtcgccctgtcgaccaatggcacgctgatcgatgagcagaatatccagcagatcgccgacgcgcgcttcgactacgtcggcatcagcatcgacggcctggaggcaacccacgacgcgtttcgccaactgcacggcagcttccagcgctcgatgcacgccattcgcctgtgccgcgaagccgggatccgcgtggggctgcgcaccacgttgacccaggccaaccacgcgcaactgccgcagttgctggcgttgatgcgcgcttacgatgtgcagaagttctacctgtcgcacctcaactacagcgggcgcggcaggcgcagccgcttgctggatgcacaccggcagatgagccgtgacgccatggcgctgattttccagcaggcctggcatgacatcgaacagggtatcgacagcgatttcgtcagcggcaacaacgacgccgacgccgtgctgttgctgcagtgggtgcaccagcatctgcccgagcactacccgcagctcgaacacttgctgcatggctggggtggcaatgcctcgggcagcggcatcgccaatatcgacaacaccggcgaggtgcacccggacacctactggtggcagcactcggtgggcaatgtgcgcaacacccgcttccgccagctctggctggaccagcccgacccgttgctgctgcgcctgcgcgaacacccgcgccgcatcggcgggcgctgtgccgagtgccgctggctggcgatctgcaacggcaacacccgcacccgcgcctgggccgatggcgacctgtgggggccggaccccggttgctacttcaacgatgccgaaatcgcccggcatcccacaccgttgatcccttgcaccacccggtgacacaaccgggggcgcctacctgatgatgaaccaaggatgtctcatgcacacgccaaccgccctacccgccagtctgcacagccccttccaccccggtgaagttgccttggtcggcgccggccccggtgacccgcgcctgctcaccctgcgtgcctggagcctgctgatgcaggccgacgccgtggtgttcgaccggctgatcagcgccgagctgctggcgctgatccccctgagctgcgcccggcattacgtgggcaaggccagcggctaccacagcctgccccaagaccaactcaacgcactgctggaggaactggccgagcagggtcaacgggtggtgcggctcaagggcggcgacccgttcatcttcgggcgcggcgccgaggaactcgaatacctgctggcacgcgacatcccctgccaggtggtgccgggcatcaccgccgcctccggttgcagcgcctacgccggcatcccgctgacccaccgcgatttggtcaactcctgtcgcttcgtcaccggccacctgcagcgcgacggtgccttgaaactgccgtgggccagcctggccgagccgagccagaccctggtgttctacatgggcctggcgaacctggcgctgatcgccgaacacctggtggcagccggtctgccggcggatacccccgcagcgctgatcagcaacggcgcccgcgccgaccagcacgtggcgcgcggcaccttgcgccagttgccaaccctggccgccgactgcgaaccgggcgtgcccaccctgacggtgatcggccatgtggtgaacctgttcgccgacgccaccctgcattaccccgccagcctgtcggcaccgcgcgtcccggtggcggtatgaaacacctgctgctggtgccgttgctctggatcagcgcggcccatggcacgccggccgaggattacagcaagtattgccagagctgtcacggcctcaaccgcatcggcgccagcggcccggcgttgctcccggaaagcctggggcgaatcaagccggacgaggtgcgcaaggtcatcgaacaaggccgtcccgccagccagatggtcgggttcggctcgcagttgagcgccgcacagatcgacggcctggcgaacttcctgcaacagccaccggccacgccggccacctggggcgcgcaggacatccgcaacagccaccgcctgctggcagatctgcgcacactgcccagcaccccgcagcaccacgccgacccgctcaacctgtttgtggtggtggagtccggtgaccatcacatcgacattctcgacggcgatcgcttcaccgtgctggaccgcttcgccagccacttcgccgtgcacggcgggccgaagttctcgccggacgggcgcttcgtctacttcgcttcccgcgacggttggatcagcctgtacgacctgcataacctcaccctgatcgccgagacccgcgtggccctcaacacccgcaacctggcggtgagcaaggatggccgctgggtgctggtgggcaactacctgccgggtaacctggcggtgctcgatgcgcgtgatctgtcgttggtcaagaccctggagacgggctcgcgggtcagcgcggtgtacaccgcaccgccgcgaaacagttttgtggtggcgctcaaggatgtgaatgaggtgtgggagctgtcctacgcggcggcgcaccccacgtttgaaccccggcgtatcccggcccacgatgtgctggacgacttctcgttcaccccggattaccgccagttgctcgccacctcacgcaaagccggtggcggccaggtgatcgacctggattcgggcacggtggtcactgacattccgctggcgggcatgccgcacctcggctccggcacttactggaagcgcgacggcaactgggtgttcgccaccccgaatatcagcctggggcaaatcaccgtgctcgacccgagcacctggacgctgatcaagcagatccccaccctcggcccgggcttcttcatgcgcagccatatcaactcgcgctacgtgtggagcgatgtgttcttcggcccggataacgacgccatccacctgatcgacaagcagaccctgcacatcgcccacaccctgcgcccagtgccgggcaagacggcggcccacgtggaattcacccgggacgggcgctacgtactgctgagtatctgggccaccgacggcgcgctgatcgtctacgacagccagaccctcaaggagatcaagcgcctgcccatgaacaagccatcgggcaagtacaacgtgggcaacaagatcgagtttgccgagggcacgtcccactagtttcggccaaacagacccaggccgatgcggctgcaatcaccgtgcagggtgaacccctcttcggtgcgccgcaatcgaccgcgctcctgggcctgggtcagctcatcatcgccacgggcaaactggccgaggcccaggtagtgataaccggctgcttccaggcgctcgacacacaacagccccatggcggtgctttgtgcggcgcagcacagcgcctgcgggcattgccccgcgtatcgcgccggtggccgggcatagtcgaatacctgcacgcggtcaggctccagcgcgatcaggctggccaacttcgcctccaggctggccagggtctgccaggcgttgccgtagcccagatcgacactgaccgaacggaacccgaaggtgcgcgccgcatcgatcaacgactggatcggtgccggatcgcgataggtgtcctgggagagagggtcctcggtacaggcatccggcacaccgatgcacacccggttgaaacccagttcgcgcaaccggccgacgctggcccaatcactgtgctggggcgccaggtcgatggcgtagtcgccgcggtcatgctcaaggaaatgcaagcgctcgcgcagccgctgcatctgcatctgcacatcgccaatgggcgctgccccacgccactggaagtgctcaaccggctggcgactgcccaggccgccaccgatcaggcgtatctgctgcgccaggctgcggcggtaaacggcactcggcgtacctggccagtgcagggtcactgccagtggacgctgccgttggcggctggtgcgcaaagcacgggcgacatcgagaggaatgacggtgtgcatggcgggctccggatccggcgacgatgcgccattgtccggtgcgacgccacggcgcaccttgatgtgcatcaaaggctttaccaactgaggtaaaacatgcccttggccagcagcacgatggcgaccatatgcccgaacaggctcagatggataaagcgcaggtaagccgcactcacccggccacggcgcatgcgcagcatcgtcagcagaaagtgcagcagcacactggcggcgaggatcagcttgagggtcaacaaggtgccgaacgacgaggcgaacggcgcggccaacaccggcaggtaacgcaacccgaccatgcccagcccggcgccgaacagcaccagcaacacccacggcatcagcgcccgggcacgcacgccgataccttgctcgacctgcagcatcacccgcgccggcaactgccgatgcagaccgcccaggatcagcacttcgaaaaacactgtgccgatgaagatcagcgcggcgaacagatgggccagcagaaacaacaggtaaagcatggtggcctcgcaggtggcgtcaaggtgccagtgtgacgccttgacgccacctgatccttgataccgatcaagctaaacccgcacgccgagcatgccggcagtgatgatcagcgtcaccagcgcaccgacgccgatcaccgcccacgtcatcgtcgcacaacgcgcctcgctcaccccatggttacgcagcacgccgcgcaggccacaccccaggtgcgcgatcaacaggaacaccgccagggaataatgcggcaccagccggatgctccaggcatcggccagcaaccccactggttcggccacggcccaggcgtaatcggtgtcggtgccgaagtagcgcgccagggtaaataccgagttgatatgggaggctataaacactgccaggtaagcgccagacgcggtctgcaaggcgtccagcaggtcggcgcggtggacggttttggggcggatcagcaccaggccgctgagtatctggaaaaagaacgtgacgataaggatcggctccagccaaccgttgcgatacaccacccgcagcacttgcatcaccgcacgatgcgcatcgttgccgaaaattccgagcagatggttgaacaggtgcggcgccaggaacaccatcaggatcgccaccgacgcaatgccatgggcgacccgcagcttgatgtaggtgcgcgggtggtgggtgaagtcaatgctgggcagcgtggccgacaccatcgagaagtaggcactcactgccaaccacaggccgctccacacgacaaggtcgtgaccattgaccttcatcaggtacagcagcacgcccatcagcgtataggctggcggcgtggcaacggccaggcaggccaggcgcctggcaagcaccaggcgtgcactcatcatgggctgcacacccgtgacgaacacgcagtagaacgccaccaccggcactgcataggcactcaacatcagcgccagagtcaccggcccgccggccccgccaacatgggccaggttgctccactgcagtgcccaggggtaatagagtgcggcggcgaatggcagcagccacagccagtccaatcgggtgtgggccagcggttttgcgagagacattgttgcgtccttactcatggattttcccccgcgaccctacggactggcgcgagggaaacccaggtccaattccacgctttttgcctacaccactgcgcgttacagcaacgggatgctgtagctgacaatcaaccgtgtctcgtccttgtccgccgtgtcattgccgcgcaataccgcactgcgccaggtaaaccccaggcctttcaaggccccggtggggatcacatagtccaggcgcaggtcgcgctcccattcgctgttgtcgcggccggcggtgcggatatggctgccgtgaatgtaagtcacactggagcgcagccccggtacgcccaggctggcaaagtcataggcataactgcctaccgcggcctgttcgccggcattcacgaacttgagcgactgggagttggtgatcaggtaaagcgaacggccctgcccctggttgatgtgcgggaagtcactttgcccggtggttttctggtagcccaggctcagcgaatgcccgctcaaaccataggtgaacagtacgctccacaagcggttgtcgacgttgccggtgttgacgccgggcgcgtagtaacccgagccgacataaccttcgccacggcccgaagcactgccgttcttaccgtcggcggtgctgtagaaataacgcaggtcgctcttgaactgccccaccggcagttgccaggtgtgcaccaggcccaggaagtgctgttggtagaagttctccaggctggcgtagtagtactgcatctgcagttgcttgctgacggtgtaatccacgccgccgtagtagaactggttactggacttgcccttgaccgggtcattggcgccggcaatcgacaggccttgggcattgctggagttgcggtccacgacctgctcgatcttgcccgcgatcaggttgacgtccttgaagtccttggactccacctgatagccacggaaggtctggggcaacaggcgcccgtcttcagtggtcagcaccggcagcctgggcatcaggctgccggccttgagttgggtctgggcaatgcgcagtttgccggtaacgcccgtcttgctgaagtcatgggcggccttgccatcgtccagcgggaagacgctgccgggggtgttatcggcaccggacttgccggcccggccggaggcgtccaggcgcaggccgtaccactcttgcaggtccaggcccaggccgaccgtgccttcggtgaaaccggactggtagttgaacataaaggcctggccccattccttgtccgaggcggccttggcgttgcgggtgtcctggttgtagtagaagttgcgcaggtcgaggctggctttgctgtcatcgataaaacccgacgcagccgcctgctgcgcagcgccgatagagacggcgagcgccaggcaagtcttgtggttcatgaaggctccgagaagtgattgaggcgccccgtcgcagcgctgtttttgttgtgcctgggggctgcagtcaacgggagcgcgcacggtatagcgttgcgtggccgggaaaaagccggcaaaaccgccaatcactttttcagtttgggtaacaatccagcgaatggcgagcgcgtgtccagcagtgaggtacggatgaagtgcaggtaactttccacccggcgcaaggccgaggtctcaaagtgcgcttcgaaaggttcgacggtgtcctgcacgcactcgatcgcgtgttcgacgcgtgccagtgcacgttgccaccgtgcatgccccggctgggtgaacaagcgcaccaatgcccgccccatggcacgtaccgcctggcgccacgcggtggtttcggcgtagcaggccagcgccggcaactgcgcctgctcgcggcgcagttcgatcagggcatggccgacgtcaagcaccacgaacgtccagcgcagcaggcggtgttgcacctggggctggccggcggacaagccatgggcctggttaagcaggtcacgggtgccgctttcgaaacccgagcccagcgccggcaagggtgcgtggagggcgaacacgacccgctggcgcaggtcctgttccaaccgacgccacaaccacgggctgttgggcggcagaatgatcgcccctgccgccgcgcacaccagcatcccgaacaccatggcgaggtagtcattgatcaagccataagggttgtagagcgtgagattgccgggcaccgaactggtgccgaaaaacaccagcatgcccaggccgtagcccgcccactgtggtttggccaaccaaaacgaccccagcatgatcaccggcgcaatcactaggcacagtaacgggaacccatcgatccggggatagacgaagaacacctcgaaaatcccgatgaccgccgccaacaccgtcccacaggcaatctggaacgacatgcgccgggggttgggggagaacgccgagagccccaccgtgagcgcggacaccagggtcatcgccgcgccactgggccaactggtagcgatccacagcgcacacaacaccagcagcaccactgcggcacgcaggccggcgcctaccgctgccagccagtgggtctgtggctgaaaaggctcggcccaacgctcacgccggtggctgtgatcggtcagggaagaatgggtctgggcgtagctgtacaactcgtcgacgaagcgataaagcaactcgcaggccgtgtgaaaatccagcaagtcatcgttgggcggatgcgccagcaacagctcggagcgcaggtggcgaacctggctcggcagcccgtggatgtaacgcttcaggtgtgtcgacaggtgcgccgcatccaggtctgtgagtacctggccggcgaagggttgcagcacactgaccagcgccctgagcgccgggtccaccgcgttcagcaccgccgtggcgccgcgcatctgcactcgatcgagcaactgatgcaggacattgaaacgcgtggtgatggccatgaactcgacgttgagccgatccaggcgccccttgcgtcggcgcatgtaagggtcttcgaacacactgacgctgcgcatcccttccaggcccactgcctcggcgatgaagcgcaggttggcgacctcgaacgccgcctggtcgtgggtactgcgcagaccgctcacgacaaatccggcgaaacgaccaaagcgttggtacagggtattgcgcatggcggcgcccgccgtattgggcagcaacgttgcgctgatcccggtggcgcacagcacgcccagggtgatctccaacacccgccacaccgccgccatgaacacctgctccgggtgccccaccaccggcaagcccaccatcaccgcggtataccccgccagcacccacccataggcgcgaaaatgacgattgcgcgccgcgccgtatgagcacacgcccacccacacggccaacccggccaggaacagctcggtgctctgggcgaacagcgccatcaacagcaccatgaacgacgaccccaccagcgtgccgatcacgcggtagacgcttttggccaggacatgcccgctgtagggctgcatcacaatgaataccgtggtgatcaccgtgctgggctgcggcaattccagacgcatcgaaagccacaaggccaggtacgaagcgatcagcaccttgaacaggtagacccacatcaccccgtcggtgcgcgcccattccaggaagccccggcgccagggcagtgctctcagccggcgtgaaaaatcagtgagtggcggcacgaaacagggactcccgacaagctggctggcacacaaggccggcgactttaggcagttgcgccagggtcggtaagtcatccagaacgtgaatgactgttacgcaaaacaccacaataaatagcgtttacagcggcccgcgacttcatgccacactggaaaaatccgttatccctggtagccatcgatggacattctgcagaacatgcgcatcttccgttgcgtcgccgaagccggcagttttaccggcgcggccgcgcggctcaacaccaacaccacccatgtatcccgctccatctccaacctggaagcacacctgcgcacgcgcctgttcaatcgcaccacgcgccgcatcgccctcaccgaatccggccaacgctatttggtgcgatgcgagcagatcctgcattcgatcgcggaagccgaggtagaagccggcgacgcccatacccggcctatcggccagctcaaggtgcattcgatgaccggcatcggccagcattacgtggtggacgccatcgcccgttatcgccagcattacccggatgtgaccttcaacctgagcatgagcaaccgcacgccggacctggtgcacgaaggcttcgacgtatcgatcgtgctggccatcgacctgcctgactccagccatgtgtcgcagaagctcggcagcacctacagcatcgtttgcgcatcaccgtcctacgtaaaaagccacggcatcgcgcaggttcccaaggacctgctcgaccacgcctgcctgcgcctggtcagcccggtgatccccctcgaggactggaccttcgacggccccaatggcaaggaaaacgtgatcatcagccactcgcccttcctggtggattcggttgacgcgatgaaaaccgccatcagcaatgacatgggcgtcggcatcctgcccgtgcatgcggcgatcaagggactgcgcagcggcagcctggtgcgcgtactgcccgagtaccgcctggaggagctgagcctgtacgccatctacccttcccggcattacctggacgcaaaaatcaaaacctgggtggagtacctgcgcagctccctgccggaggtgctcgccgaccataaggctgtgctgaagacccgcccgttgctcagcgctgtcgagtcataacgactacatagggtcataacgactacaggacgccagggtcataacgacaacaaaaatcgcaaccgactgattttcataatgttattcattggcatgctttctgactctgaagtgggcaggacaaatcttcgaaacccacagagagatcactatgagcaatgaattcaaccagcgcctcgccgtcgtcaccggtgccagttcaggcatcggcctggccgtcacccaacgtttgcttgagcgcggcgcgaaggtggtcgcgatgtcgcgtcaactgggcgggcttggcgtgttggccgagcagtttggcgagcagctcaagtggttggccggggatgtgaccgaggcagccgacctggcgcgcctggcgcaggtgacggcgccgatggggcctgtggatttgctggtgccgaacgcgggcattgcccaactggccgatggcctggacctggccgccttcgaccggcaatgggcggtcaatggcgccggcgccttgaacaccttgggcagcctgcgcgagcagttgtcggcgcaggcgtcggtggtgttcatcggcacgttcctggagcaagtgacctttcccggcctggccgcctacatcgcgtccaaagccgccctgcgcgcccaggtgcgcaccctggcggtggaactggcgccccacggcatccgcctgaacatggtctcccccggccccaccgccacgccgatctggagcaccctggggctcaatgatgaagccctgggttcggtggcgaagaccgtcaacgcccgcctgctcgacgggcagttcctggaaccgggcgccgtggccgatgtgatcctgttccagctgggccagggcgcacgcagcgtgttcggccaggactgggtggtggacggcggctataccttgcgctgatcagaccagtgcaggcatggccttggcacctccgaatgccagggccttccaaccgatcaccaacagcgacaacccggcaaagatcagcccgcagccaatcaccccggtggtgccgaaggcattgatgaacagcccgcccaccgatgacccgatcaccaccccggcattcgccgatgacacatacaggctggtggcgaactcatgcgcctcgggtgccgaagacgtgagccagacttgcgtgaccaccaggccacaggtatgcgccgcgccccagagcaacacgatcacactcatcgacgcccacgacaggctgccaaaggcatacaacaccaggtatgccgccgccagtaccaccggatacagtacggccgtcacaaccagatgccggctgagcgcacgccccacccataggttaccgacgacgccgccgatgccgaagaccaccagcatgacactgatggtccgaccgtccatgccgatccgggtcttgaggtactcagccgcgtagctgtacaccgaaaacatcgtggtaaacaccagcacggtggcgaggatcgccagccacaccgagaggctgcgcagcacagtcagttgcttgccgaagctcaggggtgccgaacgcgggtgatcgggcagcttgagccttagacccaacgccgccaccgccgttgccacggcgcaaaagtagaacgaggcctcataggaaagactcgcccccacccaagtggtcagaggcacgcccaacaccagcccaagcgtggtgcccaccaccgccagcgccgtggcatgggccgctcgttcgcgggggtacagcgacaccgccgtggaaaacgcagcagcaaaaaataccgggtggagcatggccggcaccacgcgcagcgccatcagtgtttcgaagttcggtgcaaacgccgacaacacactgctgatcgagaaccccagcaaggcgcccaccaggattttcttgcgcgccacccgcgaggccaacaacaccaggaacggccccagcaccgccacgatcaacgcaaacaaacccatcaaccacccggcctgagacacactgatcgcgaaccgctcgacgatcatcggcaagataccgaccaccccaaactccagggtatacaggccgaacaaccccaggatgatgtagatcacgagccgacctcgatcacaaccttaccgaaggcaccgcgctgcaaatgggcgaaggcctggggcacttcggcaaagcggtaggtgtggtcgatcaccggttcgagggtgtgtcgctccaccatgcgaaccaggtcttcgagggcacggcgtggccccaccgctacaccgacgatggcggcgcgcttggccagcaggctcatcagcggcgcgctcaactggtcgctctccagcaggccgatcactgagacacgcccaccgttgctcaccgcttgcagtgaacgcgccaggttgtcgccaccggccatttccagcacgtgctcggcgccgcgtccgccggtcagttccagcacggcgtggtgccagtccggcacccggccacggtggatgccatgggtggcgcccagttcgacggcacgggcgattttttcatcgctgctgctggtgataatcacacgggcaccatgggccgctgccagttgcacggcaaacagcgaaacgccgccggtgccctgcaccaccacggtctggccggcgtgcaagtggccgagttcgatcaaggccatccaggcggtcaatgccgccaccggcaaggtgctggcctgggtggcgttcaacgagcgtggtgcgagcacgcaccagtcagcgggggtggtcacgtattcggccagcatgccggggatcgggccgccttgcggtggcgcgtcggcccaggacaacggcctgccgtcgacccagccggcaaagaaactcgacagcaccttgtcgcccaccttgaaccggttcacaccctcacccacggccaccaccgtgcccgccatgtcggacgccggggtgaaggggaattgcaggctggcgcccatgccgttttccgctacctcggcgtcacggtaattgagcgataccgccgcgacgcgcaccagcacctccccggccttgaccaccggtcgcggcacacgggccaagcgcaaggtatggaggccaaaggtcgggatttcccagcgttgcatcaagtcagtcatgttcaggtctctcgtgagggttttgcgcaaggataagaacctcgcttcacgggattaagtagggcgcggctcctgggtctacggagctttcattccgcaataccggcaattgcgctagggtatcggcaattcccgtcgccaatcggtgcctcagatggacaacctcacgaccctgaatgcctttgtgcaggtcgcgcatacccacagttttgtcgccgccgggcgggtgctcggggtgacggcgtcggcggttggcaagagcgtggcgcgcctggaagaacgcctgggcgtccggttgttccaccgcagtacgcgcagcgtgacgctgactgccgagggcgagctgtttctggagcgcagccggcgcatcctgcgggaaatcgaggaagccgaggcagagttgtcccaagtcagccaggcgccccgtggtcgcctcaaggtcagcctgccgttggtgggccatccgtttttgccagtgctggccgacttcaagcaggcctaccctgacgtcgagctggacctgagcttcaccgaccgccgcgtggacgtggtggaagaaggctacgacgcggtgctgcgcagcggcgaggcgccggattcgcgcttgagttcacggttggtgggggagtatcggatgatcgtcgtggcggcccccacctacctcgaacgtcacggcacaccgcagcgcttcagcgacctggcccagcacagttgtatcctgttccgctttcccaataccggcaagttgcagcgttggccgttgcacgcacaaggcgtcgaactcgaccagcacctgccggcagcgatgatctgcaacaacctcgaggcccgggtatgttttgcactgcacggcattggtatcgcctacctgccggacttcgccatccgcgaggccctcgacagcgggcaattgctgcaggtgctgcctgactgcaccgagcacggcagcttccgcatgatgtggccgtcgagccggcacccgtcgccgaagttgcgggtgtttatcgactttctcaaggaacgcctgtttccctgatcaggcgttgtcgaaccgctgccgcgcctggcgaaattcatcgcccttctctaccacccaggtccatagcgggatcatgtgtaccagcagttccgtgcccaggctcgacagctcgtactcgaccctgggcggcacttcctggaagtcatggcgcagcaccagcccatcgcgctccaactggcgcaacgtacgggtcagcatgcgctgggtcacgccctgcatgcgccggccgatctcggcgtgacgcaagcggccggacacacccagcacgtgcacgatgcccaatgaccagcggttgcccgcgtgggtcagcacctcgcgcttgaggccgtcatcgtcggcgctgagggcgtcgcaggcggcttgggagcggcggatgatctcgtcgttatccatggggagctctcggtatcacgggtgtgccttcttatgcgcggcgatgaattctgcaagcatgccacgactttcaatccagacggagttcctatgaccccctcttccatcctggtactcggtgccggcgaactgggcatggccgtagtgcaagcactggccgacctggccgcaccgggcgaaacacgcctcgccgtgctgctacgccccgccagcctgcactcggctgcggccaacgctttgcgtgcgcggggtatcgagcccgttgccggtgacctgcagaacgacagccaaagcgtgctcgccgagcgcttcgcgcccttcgacacggtgatctgctgcaccggttttgccgccggccccggcacccagcgcaaactggcacgggccgccatcgagggtggagtgcggcgttacgtgccgtggcaattcggcgtggactatgacctgatcggccgtggcagcccgcaggataccttcgacgaacagctcgacgtacgcgacctgctgcgcgcccagcacggcacgcaatggctgatcatctccaccggcatgttcaccagttttctgttcgagccctcgttcggcgtggtcgacctggcgcagaacaccgtgcatgcgctgggcagttgggacaccgccgtcaccgtcaccacgcctgaggacatcggccggttaaccgcacacatcgtgcttgccgaaccggcgctgggcaaccaggtggtgttcactgccggtgacaccctgacctatgggcaactagccgataccgtcgacgccaccctcggcatccggctgcagcgcgagccctggccggtgccgaggttgctggccgaactggcgaaggaccccgatgacaacctgaagaaataccgcgcagtgttcgcccaaggccacggcgtggcctgggaccccgccgtgaccttcaacgcccgccatcacatcgccatgacggacgttgccacgtggatccgccaacacctcagggcaccggcaaccatccgctgaattcaccccggttgttcaatgggcaccaggcgaagtccttttgcgcgccgggcaatacctggggttcgaccgccgcgcacggtgcccctttccaatcaaacagggttgcgccctgccaggccaggaccacacccctggcctggcttttatccgtctgcacccaacgtgcggcagccgccgccatgaacgcctcgatgggttcgtcatcgatctgcgcccgatactccgagcccagcagccagcggcagacgttcacgtggtaggtccaatccagcggcggccggtggcgataggcccaggtcatgaagctgcgaaacaggttcaggccctcgggcgggtccagcttgagcagcgccgggcagatgtcgaacagggtgtgccaatacggcagcaggcgtgcatccaggtgcacgaaactgcgggaattgctggggtattcaggcggcgccggttccgcgtgcaggcggcgggacgccttgctgaccaggcggcgggcgcctgcgggcaacaggtggttcatgaaacgcactcacagtcatgacgatgggacgcctcctggtttcaggaagcccaaggcaaacgtcagcgtgcaggggaagcgcgagggttggccgagggccaggaatagcgtggcggcgccttgttgcgccgttcatgggccgggcgcggggcgtgtcccaggcccaatagccaggccaggccgaccaggaacaccagggcaacggtcaatgcgttgcagaccgggcaggcaaagtagttcgagatgttgctggaagacgggctgcccaaccctttgtcggaaagtggcgcctggttgccgctcaccgaacagaacgccccgccgatgccattgagcgcctgccccgtcatctgcccatgccccaaaccgcagacgaacaggttcatgagcacgcagaagtacagggcccaggcgatcagcgaacggtcggggtggctcgatttcatggcggcgactctaccaccagcgccgcaaaaggatgaagcgcgacatgcccctgtggcagaacgtcgcagattacgtgggcttcccagggttggtagactgggcgccctcaaagcctgacgtattgatccagagcaatgcaggcgcttcacaggatgcacagttgatgagtacgttattcacccgccgcaaggtgctgaccggtatgggcctgttgggcctgggcagcctgctgggcggctgtgactacagccccaagctgaacttcaagtacggcaaggacctgagcgacaagatcatgggccgcaccttcaagctcaagaacaccgacggcgaaaccgtcaccctgagctcgttccggggcctgatgccggtggtgttcttcggtttcacccagtgcccggccgtgtgcccgaccaccctggcgcgcgccgcccaggccaagaagctgatgggccgcgacggcgaaatcatgcaggtggtgttcatcaccctcgacccggaacgcgacacgccggagattctcgacaagtacgtcaaggccttcgaccccagcttcgaagcgctgtacggcaccccggaagaaatcgccgtggccgccaaggaattcgggatcttctatgaaaagatccccgccggcgacacctacaccctgtcccacaccgccaccagtttcgtgttcgacacccgtggcaacctgcgcctgggcctgcaggcatcccttaccgctaaagagtgcgcagaagacctgctcaccgtcatggaggtctgctaatgactgccgttcaacacctcaagcgcacccttatcggcatgaccctgctgggcctcgccgcgcacgccagcgcccaggtgcaagtcaccgacgcctgggtacgtgcgactgtgccaggccagccgtccagcggcgcgttcatgaccgtcaccgccgacagcgacagccaattgctgagcgtggcctcgccggtggccaaggacgtgcagatccatgaaatgagcatgaaggacgacgtgatgcgcatgggcccggtggactcggtggccctgccggcaggcaaggccgtgaccctcgaccccgacggttaccacgtgatgctgatgggcctgaccggccagatcaaggaaggcgaccaggtgccgctgaccctgaccgtgcagaacgccaagggcgagaagcaggcgattgaagtgaaggcgccggtacgtggcctggatgggatggaccatggcaagatgcactgagacgtgcgcacccgcctcaatccacgataaatagccttgccccggcactcgtcgaagatcgatgcccttccatgtcattgcccacctggtaactcatcccggccgtcagcgtaaactgacggccgtcttccagttctgtgtgcaactcgccttcaaggcataacagcacatgcccccgccagcaccaatggtccgccaagtagccaggcgtgtattcgaccatgcgcacacgtgttgtgccgaagtggcaggtgcgccacagggcattgccagtgatacctgggtgaatcaccggttcgaccgtggcccagtctgtggtgccaaaaggaacagcagtgagatccatggcgagctctcgcgttgattgatgtgacttgaggctattcacaagacacggtggacggtagacacagatcgacccgttttacgggatacaggtatcctgcccgcacagagctcacggacacgctgatgcatatcgaccctgcctacatccttcacgaaaccgaacactggcggctcaaccatcatctggcatctgcgttgcccggctacctgatgctggggggcaaggcgccggtccactccctggctgacatgccggaaccggcgctggccgagttgggcgggctgctggcgaaggtccagcgggtaatggaggcgcagttggagccgaaatggctgtatatcagccggtatgggcacatgccgggcttcccgctgcatttccatttcatcccggtgtatgactgggtggaggatgcgttctggcgggatgagcgctatcggctgttacaacgctttggcactgcgcagctggcgcagaccgatggggccgagttgaccctgtttgtctggcgggagtttggcgagagcactacgcccccgtcgatccagggggcgtcagtcgagcaggtgattgctcgactgggcgcggctttcagggcactgtaaccgtcctcggctttgccacacgtccacagcatcctttgctcgcggggtggcacgtgttatctccagcatttcccactccttccatgaaatcatcgtgccattagcacacttgtgctaatcgacccctcccccctgcggcgctatattccccggcacttccaacgttccccaggcaccgtgcaactattgcgcgtgggcgtgttgtgcgctggaaaaaccataacaaccccaaggaagaagcaccatgaaactgcaatcctccgttacccgcctcaccctgttgggcgccctgatcatcggcgtggccggctgcagcaacatcaagcccaccgaagatcacctcaagacgctgtcggagaccaacctgggcgaaccggtcaagcgtatttccaatgtgcgcagcgactcgatgaccacctactacgtcgccagtgccgcctccggcgagtacaactgctcggtgcccagcggtgccagcggcggcatgttcgccgtggccagctttggcatgatgaaacctgcggcctactgccaacccaaaggtgcacgcggcaacccgctgcagggcttcacccagtaaccgtctgctggctcaggtcgcgcaaggtcccgcgcagttcggcgggacgcaccggcttggagagaatggcgatctgacggtcgtgcaaggcggcctggattctctccacgtcgtgcccggtgagaatcagcgcagggacgccccagccgcgttgctcgcgcagggcatcgatgcattcgatacccgtggcgtggttgcccaggtcatagtcggcgacgatgatgtcgcaatcgctgaccagatcacgccccgaagactcggcctgcaccgcgcaaccccagcgctccagcagggcctgggtggcgagcaggacgttatggtcatcttccaccaggcacaccttcaacccggtcaacagcccggcctggcgtgtgtcgtcgcgcggtgccgtggcgcgtggcgcggtggccagggtcaagccatacaggcttacagaagtaccatggcccacccgagagcgcaggcctacttgcacccccatcaactgccccaggcgcttgacgatggacagccccaggccgacgccttcgacgtccttgtcacgcaggtggcgtacccgatagaactcctcgaagacctttgacagatgctcctcggcaatccctcgcccccggtcatgaatctccaccgccaagccgccgtcgcgaatgcgcacgccgatcagcacaggtcgttgcgcgccatatttgaagcagttggacaacacgttctgcaccatggtcgccagcagcgcagggtcgaccagcacccaatgcgtgcagggtcgcaggcgcagctccaccccggcccagcgcgcggcctcggcgttctggcgcaccaggtcggcaaggaactcgcccagatgcaccgcctggtacttgggcagcaggcgaccgttgtcgagggtgtagagatcgagaatcgagcggaacaattgcgatacgttgagcagcgaacggtcgatgttatccaccaggcgccgctcttcatcacccagccgggcttcgcgcaggcaggcggtgaacaggccgatggaatggatgggttggcgcaggtcatggctggcctgggcaaggaaacgggatttctccaggttggcggcgatggcctgctcggaggccttgcgcgtgcgctccagcaggatatgcgcgtacaccgggatcaccgtgctggtgatcatcaacatcagcaccatgaagggttgcgcctgccacaccggcgtcagccgatacacgatcagcagtgccagcaaggccagcgccgtggcaatcgccaggtagcgcgagccgtagcgcatgccgttgcccaggttgacccacaccatcaccgcatacaacggcaacgccgcttcaccgcctaccaccatgccgaacgaggtgccggtgtagtcgtggatcatgccgaagatccgccgcgccgggtaatgccccggccagcgcacgatgacttggcgcaaggcaatggaggcgagcaggaacaggaagatatacaggatcaccggcaggtaggtgtccaccgactgtcccggcaggaagcccaatgcaccgatgtagacgattgcaatgctggcgaccacgatacgcagattggcctggtcgagttcggagttggtctcaagactcatggggttacgtccttgtgcggcaatcatcaattccttcacgcaccgcaggcaggcccgaggcacggtggtaaggtagcatgcaacggcacaaccttgccccagggaggagcaccccatgaccggccgtatcatcatcgccgatgaccacccgatgttccgcgaaggcatgctgcgcaccgtgcagcgcctgctgccggacgcgttggtgcaggaagccggcgacctcgacggtgtgctcgcgctgatccacgaaggcggcgagatcgacacgctgatcctcgacctgcgcttccccggcctgacctgcatgagccaactggccgaactgcgccagcaattgcggcgcaccacgctgatcgtggtgtcgatggtggacgacccggcgctgatcgatcaggtcatggccctgggcgcggacggcttcatcggcaagaacatcgcccccgacgagatcggccaggcgctgctggcgatccgcgaaggtgaagtgctggtcaagttcaccccctccggcctgctgccactggacacccataccctcaccgcccgccagcaagacgtgctgcgtctgatcgcccagggcaagaccaacaaggaaatcgccaaggccctggatatctcgccgtttaccgtgcgcatccatgtgtcgtcgctgctgcgtacgctaggtgtgccctcgcgggcggcggccgccgtgaagtatgccggagagttccagtgacaagccgtgcgtgagcccctctgcatccgatatttatgctcacttcccagcttaataatattttatttataccccccctccccctagccttgaagtcatgccaacgctgaatccaactgcattacgcaaggacagagacatgactgaagcactcacaaaaacagacacgctggtggtgggcgccggccaagctggcgtggccatgagcgagcatctgagcaaacaaggcgtgccccacctggtactggagcgcagccgcatcgccgagcgctggcgcaccggccggtgggattcgctggtggccaacggcccggcgtggcatgaccgctttcccggcctggcattcgataccgtcgccccggacgggtttgcgcctaaggagcgcgtggccgattactttgaagcctacgcgcgcaagttcaacgcgccgatccgtaccggcgtcgaggtgctgtcggtggtacgcaatgtcggtcgccccggcttcaccgtgcacaccagtgaaggggtgatcgaagccaaccgcgtggtggccgcgaccgggccgttccagaagccggtgattccggccatcgcaccaaaagaccctgcgctgcatcagatccactccgccgagtaccgcaaccccgcgcaactgccggcgggtgccgtgctggtggtgggcgctggctcatccggcgtacagattgccgatgaattgcagcgctccgggcgccaggtgtacctctcggtcggcgcccacgaccgtccgccccgcgcgtaccgcaaccgcgacttctgctggtggctgggggtactgggcgagtgggaccaggccgcgatgaagcccggccgcgagcacgtgaccattgccgtcagcggcgcacacggcggcaagaccatcgacttccgcgagctggcccaacaaggcatgaccctggtgggcctgacccaggcgttcaagggcagcgtcgccacgttccagccgaacctggtggaaaacctggcacgcggcgatgagaactacctggccctgctggatgccgccgatgcctacatcgaacgcaacggcctggacctgccccttgagcccgaagcccgtcgcgtcttccccgatgcggactgcatcaagaacccgctcctgcaactggacctggccaaggccggcgtcacctcgatcatctgggccaccggttttgccgtggactacagctggttgaaagtcgcagccttcgacgaagccggcaagccccagcaccaacgcggcgtggccagcgaagccgggatctacttcctcgggttgccttggcaatcgcgccggggttcgtcgttcatctggggcgtctggcacgacgccaagtacgtcgccgaccacattgccatccagcgccaataccttgaataccgcgaagccgccccggtggttcgcccatcccctgtcaacgcctgagccttattgccggagttttcctgatgcctactcacacccgtatccgcatgttcaacacgaaagaaacctaccccaaccagagcctcgacaacgacctgtgccaggccgtgcgcgccggcaacaccgtgtacgtgcgcggccaggtcggcaccgatttcgacggcaacctgatcggcctcggcgacccacgcgcccaggccgagcaagcgatgaaaaacgtcaagcaactgctggaggaagccggcagcgacctcagccacatcgtcaagaccaccacctacctgatcgacccgcgctaccgcgagccggtgtaccaggaagtcggcaagtggctcaagggtgtgttcccgatctccaccgggctggtggtgtcggccctcggccagccgcagtggctgatggaaatcgatgtgatcgccgttattcccgagtaaggagccgcacatgaccttttcgatcgtcggccgctgtgccgaaaccgggcaactgggcatcgccatcagctcctcgagcattgccgtgggcgcccgctgcccgtggctgcgcccaggcgtgggtgccgtgtcgacccagaacatcacgctgccggccctgggcccggacgtgctcgacctgctggaacaaggactggcccccgccgaggccatcgacacggccctgacccgcaacggctacagccaataccggcaactgacggcgattgatcacctgggccgcaccgtgcatttcagcggcagcgaaaccctcggcacacaccacgcggtatcaggtgagcagtgcgtggcggcgggcaacatgctggccgaccgcgcggtgatcgaggcgatggtcactgctttcgagcaaggtgaaggccaactggccgaccgactgctgacggccatgcacgccgcgattgccgccggcggcgaagccggcccggtgcattccgctgcgctggtggtggtgggcgaattgacctggccgatcatcaacctgcgcgtggattgggccgatgaacaaccgatcctcgcactgcaaacactctgggacgcctaccgtccgcaggtgcaggactacatcgaccgcgccctcgccccggaccgttcgcccggctacggcgtggccggagatgaccgatgagcaccagccgcgaactgctgcaatcgctggttgcgttcgacaccaccagccgtgaatccaacctgcaactgatcgagttcgtgcgcgattacctggccggtttcggggtggccagcgagttggtctacaacctggaacgcagcaaggccaacctgtttgccagcgtcggcccggtggaattgcccggcattgtgctgtcggggcataccgatgtagtgccggtggacggccagccctggacggtgccgccgttcgagttgaccgaacgcgacggcaagctgtttggccgcggcaccgccgacatgaagggctatatcgcctgcgtgctggcgctggtgccggcgttggtcgccgcaccgctgcgggtgccggtgcacatcgccctgtcctatgacgaagaagtcggttgcctgggcgtgcgttcgttgcttgcagtgttggagcaacgcccggtcaaacccatgctgtgcatcatcggcgaacccaccgaactcaagccggtgctcgggcacaagggcaagctggcgatgcgttgcgatgtacatggcgaggcgtgtcactcggcctatgcgccctatggcgtaaacgcgatagaacatgccgccgagttgatcggtgaactggggcggatggggcagcgactgcgcgatacccaggatgagcggtttgacccgccgttcagcacggtgcagaccggggtgatcagtggcggcaaggccctcaacatcgtgccggcggattgccggtttgatttcgaagtgcgcgcgttgccgtcgcaagacccgtccgaggtggcggacgaattgaaggcgtacgccgagcagcaggtgctgccgcgtatgcaggcagtgagtgcgcagagtgcgattcggtttaccgagctgtcggcgtaccccggcttggtcaccgacgagcgcagccaggcggcgcagtggattgcggcgttttccggctcgaaggaattcgggacggtggcgtttgggaccgaaggcgggttgtttgatgcagtgggcattcccacggtggtgtgcgggccgggcagcatggaccaggggcataagccggatgagtttgtgacggtggagcaactggcggggtgtgatgcgatgttggggcggatgttggcgtctgttcgcgcttgagcacttgggttcatgcagagcctggtaagcgcttgattttgtagtgagcgggcttgccccgcgcgaggcaagttcgctcactacaaaagcaaggcatgcctggatttagccaaggattcgggcgagttcttcttggcagtaatcgacaaacagctgcaccggcttggtcagcggcgcgcggcgcagccataccgccgacaggccggaaccagtgacggtctcggccaacggcacacacacgaccttttgcccgtcataggtgtactcggtgaacggcttggtcaccagaatcgaaaacccgaaccccctccccaccatgccccgcaccatttcgatcgacggcgagctgaacacgatattcggcgtcagcccgcgttcttcaaagatgctcacgaagtaggtgcggctgggcagcacgtccagcaggatcatcggttccagcaccaggtctgccagcgacaccttggcctgttgcgcaaagcgatgatcggccggcaacaacgcatagggctgctgcggcggcatcagcggcgtggtctcgatagtcgcgcccaggtcgtgctcgaacagcatggccacgtcgatactgcccgccgtcagcgcctgcaccagctcctgttgttcgccatcgcggatacggatttccacccccggccaacgcgccttgaagccggcgatcaggcgcggcaggtacagcggcgccacggtttcgaagcagccgatatcgatctgccccgccaccacgtcattgtccgccagggcgttctgctcgaactcgtgggccacccgcagcagctccagcgccttgcggtaaaagcgtgcgccgctgggtgtcagcgacacgccctgggcgtgatgacggataaacagctgcacgccaaagctgtcttccagctgcttgatcgccgtggataccgacggctgcgcgatatacagcttgcgcgacgcctcggcgacgctgccgcactcggcggtggtgacgaaatatctgagctggcgcaggttgtaggcagccatcgggacctccagaaacgtgggacttcgcccgtcaatcaggtgtaggcaacatacccgagcgcgacaagacgcgagctatattttttaaggtctatagcaacaaacttactaatttacctccccgcgcccattgcagatgatcactccaacaacaaagcgccgcgcaggtggcgcacagcgaagtacgtcaacgtactcaccttgccttggagctcgtcatggttaccactgcaacatcctccgccccgcttatcgaaaaacacacgattggatacgtgcccccggaagaccgccatggaaaggtcagagacctgttcaccctgtggttcggcggcaacatcgcgccgttgccgatcgtcacgggggcgctgggtgtgcaactgttccacctcaacctgctctggggcatcgtcgcgatcctcgttggccacctggtcggcggcgtgttgatggcgttgcactcggcccagggcccgcagatgggcatcccgcaaatgattcagagccgtgcccagttcggctcactcggcgcactgctggtggtggtgattgccggcgtgatgtacgtcggctttttcgcctccaacatcgtgctggcgggcaagtccctgcacggcgtggtcgacgccgtgcccgtgccggtgggcatcgtgatcggcgccatcggctccggcatcatcggcatcatcggctaccgcttcatccacgtactcaaccgcatcggcacctgggtgctgggcgccgggatcgtgctggggttcggctatatcttcacccacgtacagaccaccgacttcctgacccgtggtgaattcaacatctccggttggctggcgaccgtgtccctggcggcgctgtggcaaatcgcattcgcgccctacgtctccgactactcgcgctacctgccggccgacgtgccggtcgcctccaccttctggaccacctacctcggctcggccttgggctccagcctgtcgttcatcttcggcgccgtcgcggtgctcgccaccccggtcggcatggacaccatggacgccgtcaaactcgccaccggcgccatcggcccgttgatgctggtgctgtttctgctcagcgtgatcagccacaacgcactcaatttgtatggtgccgtgctgtcgatcatcaccctggtgcagacctttgcataccgctggattcccaccgccaaaagccgcgcggtgatctcgatcctggtgttggcggcctgtgcgattgccgcggtgtttgcctccaaggacttcatcggccacttcgtcgacatggtgctggtgctactggtggtactggtgccgtggacggcgatcaacctgatcgacttctatgcgatccacaaaggccagtacgacatcgcctcgatcttccgcgtggacggcgggatttacgggcgatacaacccacaggcattgctggcgtatgcagtggggatcgtggtgcagattccgttcatgaacacgccgctgtatgtcggaccgatttcggcgcatatcaacggggcggacctgtcctgggtggtggggttggtggtgacgtcgccgttgtacttctggttggcgagtcgggacagtgcgtataagcggcggatggacggagggaagttggtgggtggggtttgatgcactccctgtgagctgagtgatgaagtcattgtggcgagcgggcttggcccgcgttgggctgcgcagcggccccagtaaggttgaatgcggtgtgccaggcaggtctcctgtgctgaatttggggctgcttcgcagcccaacgcggggcaagcccgctcgccacaacagcctgctcgccacaggggatctgtgtcgctcgggtcgatgtttgtctatcatgtggcctctcgttcaatgcctcaggaaacgcccatgcccgccctcaccttgcgcaacgccctccccgccgacgccgcccgttgctttgaaatcgagaccaccgcctacgaaggcgacgaggccgccaccctggaaaagatcgccacgcgtattgcgcagtacccgcaaggttttctgatcctggaagcggctggcgaagtggtgggtttcatcaacggcggctgcgcccacaaggtggtgatgtcagatgaagcgttcaaggagttggtgggccactcggccgacgcgccgaatgtggtgatcatgtcggtggtggtcgacccggcgcaccagggcaagggttactcaaaaacgttgatgaccgagtttgtgcagcgcatgcgcggcatgggcaagcagacgattcatctgatgtgcaaggaacagcatgtggcgctgtatgagcgcatgggttaccagtatgtgcagccgtcgccgtcggatcacggtggcatggcgtggcatgagatggtgatggtgttctagccacccgggtcaaggcggcacttgtgtgtccggacgcaagcgcttgcaacacacatcgacaacgaccagccacgccacatccccctggatgacaccgccggggatgatgccgaagtgttcgaccccaatacgcaaagctggcaacccacccaggcggcgggcaaagggcaatatacgccgctgggagatccgtaccgcgaaccaatagattttgagatcaaggccgataacatgggaggatggcaacgcgcataagccagacgagaacccgtgatgacagccctccacattgaagtcagcgaccagcccaaccccgacgccgagcgtgtcctcggcgccggcttggcggcgttcaatgaggccatcacggggtataacgaccggcgcttgctggcggtgctgatcaaggatcccgacacccggcaaatccttggcggcatcaccggcaaaaccaccctgggcacggcgtttctcgatctgtttcatctgcccgacaccctgcgcggggcgggtcttggcagtcagttgctgcacgcctttgaagatgaagcccggcgccgcggctgtcgccacgcagtgctgtacaccctcagttttcaagcgccgggtttttacgagaagcacggctgggtgcgctttggtgagattccatgcgaaccggacggcagcagccgggtgtttctgtctaaggcgctgtgatgttttaccagctccctgacgccccgccgccgccactggaaccaccgccgcccgatgaactgctgctggaactggaacgggagcttccggagcttgagccggaacctccgccagaccccgagccgccctcggaaatactctggataaacacaataaacgccatgatcgacgcggccggtatcgccactatccagccctggtaaccctgccccagcaacacccccacggccacatagaccgccagcaccgccaacacacgtaacatgaaaaagcgcgggcgttttttccaggattcacggatgacgaaaaacagccccacgtataaccccagtaccaaggcgccgccaaacggccacaccagccaatggacgaaattgacctcgacgaagtggttcaccaccagcaccccgacgatgtacgccagcagccccaacacgctgtagaacaccccacgcgccagccacagtgagccgaacgtggcgccgccgatcagcaacgtcagcggcactacaaacaggtacatcggccaatcgcgcccgccgccatagatcgtcaggagtactgtcaccaccgcggtggcaatcaacgcgcggcgccaatgcagcttgccggcggcgatgagcacaccgccgatagcgccgatgacaaacgccagcagtatcgcaatgaactgcggattgagccccggccccgcaatcgcgggcaagtcaccaccgtccaccagcaccaccaggtcgttcacgccctgggagacgccgcccacaaaatcgccctggcgaaacgccggggtgatgtgctcttcgatgatgcgatgggccaacaggtcggtcactgtgccttccaggccatagcccacctcgatgcgcaccttgcgatcatccttggccaccaccagcaggatgccgtcgttgatgtccttacgccccagcttccaggcacggaacagttggttggcgtagtcctcgatactcgcaccacccgtggtgggcacgagcagcagcgcaatttgcgcgcctttgcgctgttccaggtcggtgagctgttttttcagacgggtggcagtggcggcgtccagcgtgttggtgaggtcgatcacccgctggtcgagggccacgccgatgggcgaatcctgcgcatgggccgcgctcaacacgccgataagcagcagtgccaccaggcccaggatcgattgccgcaaaatcgccatcatgctttgttacctgaagtttcttcctgaaggcgccgactttaccttatcaacgctataacgcgtgaccccacggcgttgactatctaaactgaccgtatacatagcaatacgccataaccgggaaatccatggatctacgtcagcgcaacaacgtcaatgtgatgggcaccggcacgtcgaccctggtgttctcccatggttttggctgcaaccaggccatgtggaactacctggcgccgcatttcctcgagcgttttcgtgtggtgctgtacgacctggtgggcgccggcctgtctgacctgagcgcgtacgacaaagacacatacagcacgctggacggctatgcccgggacctcaatcagattatcgatgcccatgccatcggcccggtgattctggtaggccactcggtcagcgcgatgatcggcaccctcgccgaccgccaggccccggggcgtatcgccgcccacgtgatgatcggcccgtcgccgcgctatatcgatgacgacggctatgtcggtggtttcaaacgcagcgatatcgacgacctgctcgacaccctcgacagcaacttcctcggctggtccagcgccatggccccggtgatcatgggcgcgcctgatcaacccgcattgggcgaagagctgaccaagagcttctgccgcaccgaaccggatatcgccaagcagttcgcacgggtgacctttatgtcggacaaccgccaggatgtgatcggcctgaccatcccggtgctgatcctacagtcgaccgatgacctgatcgccccggtggctgtcggcgaatacctgcacagcatgttgcccaacagcacctatcacttggtggacaacgtcggccattgcccgcacatgagtgccccccaggcttgcgcggcggccatggacagcttccttgcgccgtggacaactgcacgtgccagctgatctgttcgacagcgccgcctgcgccctggccgtcacctcggaagatggcaccctggtgcaaaccaacgcacgcttcagcgaatggctgggcttcagcgccgccgagttgtgcagcaagcgcttccaggaccagctgaccatgggcggccggatttttcaccagacccacctggcgcccatgttgcgcatgcatggcagtgtcaacgaggtgaagctggacatgctgcaccgtgacggccacaagatcaccgtgctgctcaacggcaacaagcgcgagcaggccgacgtcgcggtgtacgacctggccctgttcggcaccaccgaccgcgacaagtacgaacgcgagctgctcaacgcacgcaacctggccgaagcgctgttgcaggagaaaaccgccaccgaactggccttgcagcaagcccaggccgagttgcgcgaggcctatgcgatttcccagcgccgcgcattgttcgccgagcagatggtggcgattgtcagccatgacctgaagaacccgctcaccgccatccgcatggcctctgactttctcagccgcagtgaacgcacggccaaggaacgccagttgctggggcatatcggccagtcgtccgagcgcgcccaacgcatgatcgccgacctgctggacttcacccaggcccgggtcggccagggcatcactatcaaggccctgccgttggacttgcatggcgtgattcatcgcaccgtggacgaactgcgcgtggcgtttcccaaggcgacgttggaacatcacgcagaaggccatggcgacgcctgcctggatgccgaccgcgtgcagcagatcatcggcaacctggtggccaacagcgtggcctatggcgacctgcaacgaccgatccggattacctcacgcctgggcgttggcggctgcgaagtggcggtacacaaccacggcgcggccattcccgaagcgttgctggccgggctgttcgaacccatgacccgaggtaccgaccagggcagtgatgtgcgcagcgtgggcctgggcctgtatatcgtgcgcgagttggccagggtgcacggcggggacgtgacggtgagttcctgtgctaccggcggcactacctttaccgtgacgtttcagagtacgtaggcgctgccttgcatcaccggctcgacactgccggtcagcaccacaccgccctcacccgcccagtgcacggtcacgatgccgccgtcgcactccacctgcaccgtggcatccagcaacccgcgccggatcccattgaccaccgcgccgcagcagcacgagccggagcccagcggcacgccgccgccacgttcccagatgcgcaggcgaatacggccgcggtcgagcacctgcacgaaatgcacattggtcttgtccgggaacaaccgatgtttttccagcccagggccaacggcggcgatgtcgattgcgctgaggtcatccacgaaaaacgtacagtgcgggttgcccatgctgcacgcggccgggccaccctcgataggcaacacacacgtgtccatggcctcggccagcggcactgcatgccagtccagcgacggctcgcccatgttcaccgagacttgccgcccgggggcacgtacgcaggtcagcaggccccggtcggtacgcaacagcaccgaatccgtagcagcctcatgcatcaagcgatcagccacgccacgggtcgcgctgccgcaggtggccagcggcgtaccgttggggttccagaacttgatgcgcgcggcggcatcatcgcagtcgagtaccacggcaagctggttgaaaccgataccggtgtgacggtcgcccaggcggcgggcgatctgcgcggtgatggggtcgtgcaagccacggcgatcgatgatgatgaagtcatcgccatgggcgtgcattttcacgaacggcaaaagcatcggttgtcctgtggtcgacctgtgggggaactgaaggatactctgaaccggcccactcttatgagacccacctatgctaattgtcttcagtggcctgcccggcaccggcaaaaccacgattgcccgcgaactcgcacgccagaccgcggcggtttacctgcgtatcgacttgattgaacaggctatacgcgaggccggtgtgctggcaggggacgtgggtgccagcggttatggcgtggcgaatgcactggcgctgagcagtctgcaactgggccacaccgtggtggcggactgcgtaaatccggtcagggaaagccggcaagcgtggaaggccgtcgctgcagcagcaaaggtggcattactgaatgttcgggtgatctgctcagaccagcaggaacatcaacgacgggtggaaacccgcacgggggatattcccggcctggttccgccctcctgggcgtctgtgttggcgcatgagtatgaggtttgggatgaagtgcccttgacgctcgataccgcctgcatgacaccggagcaagccgtgacaacaacgatggcgaacctcacctctgtggcgagcgggcttgccccgcgttgggnnnnnnnnnnnnnnnnnnnnnnnnnnnnnnnnnnnnnnnnnnnnnnnnnnnnnnnnnnnnnnnnnnnnnnnnnnncccaacgcggggcaagcccgctcgccacaacaggcctgctcgccacgaggttgagccgcctacaacacgctgcccatcgccttcatcaacaccaggtcccgcccatagatatccggcgcatacaccaaaccgccctcacgattgacctccaccgtccagtagctcaacaacaccggcaccggcgtggccagcctgaattcgtgggtcacgccggtggccagcagttcatcggtgcgcgcacgttcggccgggctcaccagcagatcgcgcaagagcagcggttgctcgacccgcacacaccccgaactgaacgcccgtggccctttggtgaacagcggctggctcggcgtgtcgtgcaggtacaccgagtacgggttgggaaagcgcatcacgatcttgcccagcgggttgcgcgggccggcctcctggcgcagcaggatattaccggggcgcgcccagtcgatctgttccggcgccagcgggtggccttcggcatcgagcacttgcaggttctgctggcgcaggtattcggggttgaggcggatggccgggagtttgtcctcgcgcatgatggtgggcgggatggtccaggtggggttgagggtcagccgggtgatgcgggatttgagcaacggcgtctggcgctcggcgcggcccacttgcaggcgggtctgccacaccgggatgccgctctggtacacgctgagttgcgcggcggcgacgttgaccagcacgccttcaggctccaggtcctgggccaaccagcggaagcgttcgaggttgatgcgcagttgttcgcgccggatcgccgggctgatattcagctcggccaccgtaccggcgccgatcacgccgtcagcctgcaacgaatggctcagttgaaaggccttgaccgccttgaccagttcgtcgctgtactgcttgccgccgggggccttggccaggtaacccccaccgatcaggcgccgcgccagttccggtacgcgcgggtcgtccatgccggggcgcaacagcgggccgttggcgaccgggtcccaatgtggcaatggttgctggcgcacagtggaataggcattgcgcaggctgcggtagaggtccgcgctggggcgtgcctgatcgaacgcctggggcatgtcctgcaggccggtggcggcaaaggccagcacttcaacgttggcgtcgcgggtcggtggctgggaatgccacaggggctcgaagcgcgattgctgcaggcgcccgtagtgcagatcctgcagggcttgcaagtagtgctggctggtcgcgatgtcgctgcacagcacgttggccgtggcatctggcacaggcaggctatagtgggtggggtccaggccgtcatcggcgagcatcagcaactgagattgcagggcttgccggcgctcgtcggcggaccacaacggcagattcccctgctgttggtagaacgcttgcagacgcagttgggcggcggcgtcaatctgcggcgccaagccggggcaaacgctcggcaattgcgccaaggcctgctgcaccggcgccagatcgaccggcgcaggtgttgtcaccggcaacggctcgaccggcagcgcgtcggctgtcgcgaccaatggtgcaacgagcaggcaaatgctcaagtaacatgcgtgttttttgaacaattgacctggctccaatccacaccgggggatactttgtagatgctgacttttatgcgccgcctcggcttgatctccgtgacgctggctacgctgagcaattttgcgctcgccgctaatcagacctctcctaacttgtatagcagcctggcgcgctcggctccagaactcaatcccactgtactcaaaagcgccctcaacgcggtgcagtgcgcggtcaataacggcgaggaacgctccgaacgcctggcggtcattgactactcccagccttcgaccgcccgtcggctatggatcttcgatttgcgcaagaagacccttgttctgcgcgacctggtggcccacggcgccaagtccggggaaaacttcgccacccagttctccaacctcgaaggcagccaccagtccagcctgggcttgttccgcacccaggaaagctacctgggcacccacggttactcgttgcgcatggacggcctggagccgggtttcaatgaccaggcccgcgaccgcgccatcgtgatccacgccgccgactacgtaagccccctgtggagcaagcgcgaaggccgtatcggtcgcagccagggttgcccggccgtgcgcccgcaggtggcccgtcaggtagtggacaagctcaaggatgggcagttcatgttttcgtggtaccccgaccagcgctggttgaagtcgtcgacctacctcaattgcaaaccccaacaggtggcgagtagtcgtacaatccgtggcggatagcctgtccccatagataagagagcgccgcatgcttctacataagtccacctggatcgagatcgggcagtttctggaacgcagccgcacggtggtgattcccatcggttccaacgaacagcatggccccaccggcctgctcggcaccgactggatgtgcccggaaatcatcgcccatgaggcgcagcagaacgcggatatcctgatcgccccgaccttcaatatcggcatggcccagcatcacttgggttttcccggcaccatttccctgcgcccttccacctttatcgccgcgattggcgactgggtgcgttcgctggccgggcatggtttcgagaagattctgtttctgaacggccatggcggcaatatcgccacgattgaagcggcgttttccgagctgtacgccgaagcgagcttcgcccgtcgccccgccggctttgcgttgaagctggtgaactggtgggacctggagggcgtaaccgacctggcccagcgccaattcccggtgggccatggcagccatgccacaccgtcggaaattgcggtgacccaatgggcctacccggacgcgatcaagaccgccgactactcaccgcaaatcgccaacaccgggccgatccgcgaggcgctggacttccgcgcgcgcttcccggatgggcgcatgggctcggacccggcgctggcgacggtagaaaaaggtggggagttggtggcgttggcggcgcaggggttggtcaagacagtgaacagcttcagctacgaagccaaaccctgagccatacatagatctacatgtggaagggggcttgcccccgataacagtgtgtcagctacagatgctctggctgacccaccgctatcgggggcaagccccctcccacatgtggctttatgtatggcctgggattactggcagtcctttgccgccagctctagccgcgacggcgtaatcgtcgacgccaacggcttgcgctcatacaagaacaccttggcgccctctccagccttgtaggcttccagcacgtcatcggcggcaatcttgctggtcagcaccactttggcgtgacgcgagttctgggtgacggtcgaagtgatcccgtgtttttccagcttgggcagcacgcactgcacataggcttccgggctcttgctggtttgcagggtcaggctcggggcattaggggcggtgacacaacccgccaacaccagggaagcaatggccaaggccggggcgaaaaaagcgcgcatgaaaaattcctgactataaaaataaaggttcacatcaaccggcacggaccaacgctttgagcgacgcatcgaactgcttcaaggcatcgagttgcacatcacgctgctgctcgatctgcgcggcaatctccggcgcggccttgtcatgtacccacaccgatggcacccgcttgtgcaccgagccttcggccctggcgatgtactgcaggttcgcgtcatagaaccgcgcaataaaacgcgcctcgaccacatcgttacgctgggtcagcagttggttgtgggtatcgagcatcaccaccacatcggggtgtgcctgcaccagggcatccaggttgtcgtagaccgttactgacaaaaaggtgccctgcagcgagctcatcaaccaatcgatggccagttccgggtcggaactgttgacgaacgcctggcggatacgcccgtcgagggcatccttggcgccattcaaggccatgtcgtggtagcgttcgaggtagctgaggttgtcgcgggtgttgtcgctcaacaacacacccaccgactgcgcgtgctgcagggagtctacgctaccgttgataggtagcaaatggctggtatgcagatcatcggcgattgccgcgttgttgacgaccaccgtgccaagcatcagagccatcaaagccaactgaataaacgtcctcatcgcgcatttccttgaacagcgtctcgatggggcgattttccgcttttccggaaaaaacagaacttgcgatgcgtgatggtgactattatctgaaccgatagtgctgacataaaacctataaggaccacgccatgaagccccaccagaaaaccttcgaccgcatccgcgaagccgtactaccggagtttcgcgagcgggtcgccgattacctggtcgactatgaacacgtgctgcaggacgaggcggcggacgcggatcggatcagcgccagcgcccagcaactgcgcggttacctgcgcggcctgaacaccacgcgggtgctgggtatggccgactgggaggagctggaccgccgtgtgaaagaggattggctacgggtggtcgaagccgaataactgccggggtgtatcgatcagcaaggcctgcgcgaccgctgccgaccagcccagggcctggcgctgctcgatcactacgcggtagccgatggtggtttcatgctgggtgtgcggccagtcactgccccacaccaagcggtgcagaccgaaactctgctgcaacaacggcatggcctggcgcgcaaactcaaggttctgcgccgggctgccggccaggcgatagatccccgagaccttcagccacaactggccgctgaggcccaagcccagtaactcggcaaaaccgcgctgcgcgacgccgagtcgtgcatctggccggccgaaatggtcgaccaccagcttgaccccgaacggcagcaactggcgcaccaattgcggcaggtcgtccacctcgcggtgcaactctacgtgccagcccagcacgacgatgtgctcgaaaaaaaccttccagccgggctcggcaaagtctggcagcgcccggcccaccaggttcaagcgcacgcccaccacgccggcgcgggccatcgcctgtaaagcgtgctgcgggatatcacggtccaccaccacgacgccgcgcaactgatcgggtgcctgctgcaaagcggccaacaggtagccgttgtcggtgcccaggaaactgggttgcaccaacacgccgtggctcaggccattggcgtgcaagtggccgatgtagtccgccagcgtggcgtcgtagcctggagtgtagcgacgctcaccggccagggtcagcgcctggctgaatacatgggcgtgggcgtcgatgccggtgatggaacggttatcaagcatggggtcgtctttcaaaagtaaaaaggatcaggcctgggcgcgctggccgctcacgacgcgctcggtgggtgtcgcttccagcacgcggccacgggtttccggcaggcacagcgcggcgatcacggcgacgccgtaggcgatcccggcatcgatgccgatggccgagccgagggacatcgagtcgctcatatgccccaccaggaagggaaacaccgccgacagcacgcgcccgaagttgtagcagaagcccacgccggcaccgcgcacatccgccgggtacaactcgttgaacaacgcccccaggctggccgggataccggcggcgaagaaccccagcgggaagccaaggaacagcatctgcgtattgctcagcggcaggaacacataggcctgcacggtgatcacgcagcacagcgcaaacagcacgatgttcttgcggcgaccaatgcggtcgatcagccagccactggcgatgcagccacaccagaaggcaaagatgatcaccgccaggtagccgcccgagttgagtaccgacaggttgcgctcggtcttgaggaaggtcggcagccaggtcatcaccgcatggtaaccaccgtgggcacccaggcccagcaggccgccgaacagcgtcacgcggatcagctcagggcggaagatgccggccagggacttgaagaaactctggggaatcgcctgctccttttgcaggcgctggaagctgtcaggctcctccacgttgcggcgcacccagataatcaggaacgacggcagcagccccaccacgaacattacccgccaggccatgtcctggggcacaaacgaatagatcagcgcaaacaccccgaccgccacgccccagccaacggcccaggcgctctgcacggtgcccatcaccttgccgcggtacttcgggttgatggtctcggccatcaacaccgcgcccgccgcccattcaccgccgatgccgaagccttgcagtgccttgacgatcagcaactgatgaaagccggtgacgaacgccgacaaaaacgtgaagaacgaaaaccacaggatcatccactgcaacgtgcgtacccgaccgtagcggtcggacaaggtgccgccgacccaaccgccgatggccgaggtcaccagcgtgacgccgctgatcagccccgcatcgcccttgctcaaggcgaaggccgcgatgagtgccgggatcgccaggccgaacatctgcacttccaatgcatcgagggaccagccgccgaagcaggcccagaacgttttgcgctcccgaggagtgacttggcgataccaactgaacatgatttttatccttataggtcaaacgcgaggcagccgggcgcgaaccgcgccacagccgggccagtgttgggcaaacaattaacggtgcgggtgtgcggtcagcgaatgtccacgcggtagcggaagtgttcggcatgcccacgggagcgtcgccactccaggggttggccggcgtagtcgcgggccagacgctcgatcaccaccaccgggctgttgaccggtacttgcagcaaccgcgcgtacaccgcgttgaccgattcggccgtgagggtttcctcggccgaggccaccacctgcccgcagacactctcatacaccggatagagcagcgggccttgcgcggacaggtctatgtcgagcaaggcctggaagcgcgcacgcggcagccagatttcttcggcgagcagcggctgcacgtcaaacagacgggtccgaacgatgcggatcacttgggcctcgggggccaggcccagcgcctcgctggccgccgacggcgcggccacggactcgaccgtgaggatgcggctttgcggcacctgacgctcgcccgacgggccttgaaaacggaaaaacctaaacagcgacgactggaattgcgggcggcgcacaaaggtgccacggccctgctgacgctccagaatgccctcgctcaccagcgcatccacggccttgcgcacggtgccggtggacagcgcatactcggcggacagcaccgcttcagtgggaatcgcttcgccagggcgccagcgattgttggcgatctgctcgatcagctggtcgcgcaagcgttggtaaagcggcaggcgggcatcactggacagcgtattcatggggtcacattcactttgttatgtagtcatatatatgaatatgaccggagtattcttccgtcgggtgacgcctgtcaagcgcatcaccgcaaaaggaagatgaatggtcgttactgcgtcgggcgttgttgctgcacccacgcttgcacggaaggccgctgccactggcgtcgggcgtactccaccaactcggcaggcacgctgtcaccgttgaggatcaggcgattgagcatcacggccaggtccacgtccgcgatgcaccactcaccgaacaagtacggcgggttacccgccaacagcgcctgggtcgcactgatcaacttcgccgccgccgcttcagccactggcgacagtgcgggcatcttctgcccatagaacaccaccatcgtcgagcgctcctgacggatcggtagcaagtcactgcgcagccacgcctgcacctggcgcgccctcgcccgctgttttggatcggccgggtacaccggcacttcagggtaggcctgctccaggtactcggtgatcgccgaggactccgacaaggcgaagtcgccttccaccagggtcggcacgcgctgggtcagggacagttgggcaaagtcggcggcgtgctgttgcgcggcatccaggtccagggcgatcgtgtcgaacgctaggcctttttcgcgcagggtcacgaacaccgacatggcgtaggggctggtgtacagatgatccacatacaggcgcataacgattctccttgaggggaacaccacgctacgagatgcgccacaagaaagacaatgcgctgtttttatgggggcattcctgggtggaataccgggctaaccggcaaatccgccctcgtccagaaaggcacgttcttcatccgtggtctcacgcgccaacacctcgtttcgatgaggaaaacgcccgaattgctcgatgatgcgcgcgtgttccttggcccaatggtaggtgttggcgtccagttgccggttcaggtccaaggagcgctgttgatcggccgggtcttccgaatgttcgaatggcagatagcagaacgcacgcaatgccggttcgacctgccggtccagcccggcgtccaccatgcgccgggcatacagccgtgcgagcgggtcggtggcgaacatatgggcggtgccgcggaaggcattgcgcgggtactggtcgagcaggatcagcagcgccagggcgccatgcgccgagtccagccagctttccagctcacgccgggccgcttgcaggtgggcggtgtggaaggtgtcgcggaagctggcgtcgaaggcagcgtccttggcaaaccagcgtttggggccggcgtgttgccagaagtcgatgacagcctgcgcagtggtcatggtgagtacctggaaagataatttagctgacggcatcagaatccaatgttataggataacacccccttgccgccctgccctgtgatcacgcccatgaccgatgctgttcccctgcgccaacgcctgctctccatcgacgccctacgcggcctggtgatcctgttcatgctgctcgaccacgtgcgcgaaaccttcctgctgcaccgccaggtcagcgacccgatgaccatcgacagcaccgagcccgcactgtttttcagccgcaccctcgcccatctgtgtgcgccggtgttcgtgttgctcaccggattgtcggcctggctctacggccagaagtaccagggccgccgcgatgtctcggcgttcctgttcaagcgcgggctgttcctggtggtgctggaattcaccctggtcaacttcgcctggaccttccagttgccgcccagcgtgatctacctgcaggtgatctgggcgattggcgtgagcatgctcgccctggcggcgctggtgtggttgccgcgagcgctgctgatcgtgttggcgctgctgatcattggcgggcataacctgctggacggggtgcacttcgatacggggtcggccttgcatattccgtggacgatcctgcatgagcgcagctggatcgaggtgggcgattcgctgcggttgcgcacgacctacccggtgctgccgtggatcggcgtgattgcattggggtacagcctgggcccatggtttgccaatggcatgccgccggcgttgcgccagcgttatctgttgctgggtggtgtgggtgcgttggtggggttcgtgctgttgcgcaccgccaatggctacggcgagaagccttggcaggcctatgagagcggcgtgcagacgctgatgagctttttcaacatcaccaaatacccgccttcgctgctgtttctggcgctgaccctgggccttggcttgctgctgttactggcgtttgaacgcgcggggcaaaaacgctggatcgccatcctggccaccttcggcgcggcgccgatgttcttttatttgctgcacctgtacgtgctgaaaatcctctacgtcgcctgtgtggcgttgttcggcctcaaccacggcaactacttcggtttcgacagcatcggcgccgtatggctggtggcgctgttgttgccactggcgctttacccgcctgtgcgctggttcgccgggctcaaggcgcgtcgccgcgacctggcctggctcaaatacctctgatccctgacgctcctacagcgggtggtgtcaggccgatgcagccatcgtcggcagacggtaatagggagacaaactcattttacttctgatggtcgcaaggtccgctcatgctgcgaccagatgcacatagaacgcgtgaaacatgaaatatgcacacaccgcgagagccaaacccatgcaccggttgaacagggtgaacgccgacgccccattgatcctccgccccagcagcgcccccaacaacgcgtagatccacggcgcgcaaaacgccccgaaggccagcgccgccgagaccacggcgatggacgcgtagaggaagatgtccatggaagacctgtagtagaggaagtgaggcgagtctactgagcggggttggggggattcttgtacgtttgtggtagggcaggatttggcgatgctgggcatcccagcgggagcaagctccctcgccacgggtatagtgtttgtcgaactctttgggataaaaccagacatggatgcaatcaatcaaggcagttgcctctgcggtgcagtcacttatcaagtcgcgacaccgctcaaggccgccacccactgccactgcaaaaaatgccagaaagtgcatggggcagcctttgccacttacgccagcgcgcctcgatcagacgtgactatccaagctgtgcgggacacgttgaaaagttatgagtcatcaccgggcattactcgccagttctgttcggaatgcggttcatcgttgttctggcacgatgcaaaagggctttatcccgattggatttcgattgcactgggcacactcgataccccgttcgcgcctcaggacctgaagntgaaaagttatgagtcatcaccgggcattactcgccagttctgttcggaatgcggttcatcgttgttctggcacgatgcaaaagggctttatcccgattggatttcgattgcactgggcacactcgataccccgttcgcgcctcaggacctgaagcaaagctgcatcgagtccagggtcgcctggctgtaggagcgagcttgctcgctcctacagttgctacccgcgtttacggacctacatcaacggaatcgagtagttcacaaacacccgattctgatcctggtcccgcgccacttcactgcgcgacacaccgttgcgccagccgaacccgacgttcttgaacgtgccgctctgcaccacgtaatccagcgagatatcgcgctcccactcgctcgcatcgttgccgctggcagtgaggatatgctcgcccttcaagtacatcaccgacgccttcaggcccggcacgccaagcgaggcgaagtcataggcgtattgggcaaaggctgtgcgttcaccggcctggatgaaggtctgcacggtacggtcggtgtagaggtacaggctggaaccgccctcccctttgttgaccaggccgccctggttgagttgggcgaagttgctgtcgtccgagacttgctggtaaccggcggtgatcgcgtgcgggcccagggagtagatgaacgccgcgctccaggtgttgttgtcgatttcacccgtgccgttcttggtatagccgccgagcttgtaaccttcggcacggccggcgacgctgctgttcttgccgtcggaggtggtcttgaagtagcgcaggtcggttttcaatgagccgtagtcgcccagcggcaatacatggatcagaccggcaaagtgctgctggtaatagtcttcgaggttggcgtagtagtactggaccaacaggtccttggttacctggtagtcggcaccggcgtagttgaatttattgctttcctgggtgccgcccgccgccgccaggccgctgcgatcactggagccacgaccagtggtgtgctgcagttggccaccgaccagggtcaggttgtcgatgtccttgctggtgatctgcccgccttcgaacgactgcggcaacaagcgcccgtcgttgctcaccaggatcggcaggttcgggcgcaggtagccgtagcgcagttcgctcttggcaaaacgcgccttggccgtcgcaccgccacgggcccaggtgtcggcggccttgccgtcgtcggtggggatcatcgaactgcccacatggcggccggcgccgctgtcgagggtgacgccgagcatgcccacggcatccaggccgaagccgaccgtgccgtcggtaaaccccgactggtagttgaggataaacgcctggccccactcttcggtcttcgacggtgcggcggcgccgtcacggttgtcgttgttgaagtagaagttgcgcaggctcaagttggctttactgtcactcaaaaaatcagccgaggccagggggctcagggcaatgcccaggccgccggtcaatacgcttaacacatgcaaagtggctttcatcacaacctcagtcaattaatccatgggcgtcataaaacggatacggccccgggtattccccgaacacgccgttgtggctgatcaaaccctgctgcgcctcccagcgatgcaacagatagcccgccggctccaggttgaaatgcgcgggcgccgcttcttgtaaatccagcacgatctgatgggaggtgccggggcatacacaactcaggctgccgccgaaacgccgctgcatcggccggtgcagatgaccgcagagcaggcgctccacttgcggatggcgcgcaacgacgtgctccagggcggcagcattgatgaagggttcgcggtccatgtggccgatgccgctgatgaacggcgggtgatgcaggatcagcagcgtcggcgcatccgggcgcagggccaattgctcatccagccagtgcaattggctatcgagcaattggccgccgtgagcgccgggaatggtcgagtcgaggccgatcaggcgcagcggatggtggtcgaccacccagtccaacgggccatcggccgacaacggcagatacgcgtgatcgcggaacgcttccagcaacggcccacggttgtcgtggttgccgggcaccaggtagcacggcatgtgcagccgggcgagttcggggtgcaacacggcgtattcatcggcacggccaaagtccaccaggtcaccgctgatgaccacgatgtcgggccgtgggtgactggcgttcaagtggtcgacggcacggcgcagcgcgcctaacgtgtcgacaaccccgtaagtgaggcgctggccggctttaaggtgcaggtcgctgatctgcgcgacgagaaacggacgattcacgatagagtctcaagcattcagggtgaacaacatgtgcggcgcaattgccagggcaatcggcgcgccgacggcgtacagctggttatcgctgctgtcgaccagcagcggttgcgggccgcccacatccaccagcaggcggctttgcgcgccttggaagaactgcgccagcaggtggccgtgcaagtgcccttcgctctccatcaccttcaggtgttcggggcggcaatacaccgtgctgggcacgtgggcgtcatgccacggcaactcgccgccacagactttcaagccatgggccgctggctcgagcacggcaaaggcattgaggttgccgacaaagcccgcaacgaaggcattggccggtttctggtagatgtcacgcgggctggccaactgcgcgacacgcccgtgttccatcaccaggatgcggtcgcccagggccatggcttcgccctggtcgtgggtgacgaacaccgaggtgatgcccaggcctcgcagcagctcgttcagctcgctgcgcaggcgttcgcgcagttgcgcatcgagggcggccagcggttcgtccagcagcaacactttcgggcgcggcgccaaggcacgggcaagggccacgcgctgtcgctggccgccggaaagttcgtggatgctgcgctggccgtggtgctgcaagcccaccagttccagcaattcttcgcagcgcttgttgcgctccaccaccgccataccgcgaatcttcaagccataaacgatgttcccggccacatccaggttgggaaacagtgcgtagttctggaacaccatgcctacgtcgcggcgttcgataggaagacgggtcacgtcctggtcgccgaaccacacctggcctacatccgggcgttcgaggccggcgatcaggcgcaaggtggtggtcttgccgcaaccggacgggccaagaatggccagggtttcgccgccttcgacggtcaggtccaggtcatgcacggccacggtgccgtcggcgaatgccttgcgacagccttgcaagcggatagtgatagcggtcatcgacgctctccacgggacaaacgggcactgatggcctgcagcgctatcagcagcggcacgatcatcagcaaaaagataagggtgtaggcgctggcgatttccaggcgcgccgaggcgtagctgtcagccaggcccacgggcaaggtcttggtcatcggcgtgtgaagcatccaggtcaggttgaattcacccagggacaaggtcaccaccatcaacacgcctgccaggatcccggcccggcagttgggcaccaccacgctgaaaaagcgcttgatcgggccggcacccaggctggccgccgcttcctccagtaccggcaactgctggcgctgcatcaccgccatcaccgggcgtaccaggaacggcaaggtgaacagcacatggccgaccagaatgaacagccaactgctgcgaaaggtgccgaactggccgtaggtcagcagcaaggccaacgcactggccaaccccggcatggccaccggcagcaccatcaactcttcgaaggcgcggctgaagcggttgttcatgcgcaccaagccgtaggccgccggcacacctatcacgcagacgcacactgcgcaggccagcgccagttgcagcgacagccacacggtgggcgaatacgcctgccacacctgcaccagccaatcgaaggtcaagccactggacagcccgacgaagaaattgcgggtcaacccggccagcagcgacatcagcactggcaccagcatgaaggcgcacaccaacagggtgaacagcagttgcagcacaaacagcgatgagcgcttcacagcacactccccgaatttttcaccaggcggcgcgtgagcagcagcacggcccaggtcaccgcgcctagcaccaccgacaatgcggccgccacggcgaagttggcgtagttggtgaacacgttgtagatcgccaccggggtgacgttcagccgcgtgcccaaggtaaaggcggtgccgaacgcgcccatggaggtggcgaaacagatcgccccgcaggaggccagcgccggcgccaggcccggcacgatcacatcgcacaccacccgccaatgcccggcacccagggagtgcgcggcctcttccaggctgcggtcgaggctctcgcatgcggccatcaccgtgaggatcacccgcgggatcgagaagtacaggtaacccacgaacagccccgccagcgagtaggcaaagatccagcgttcaccggccaattgcaggcccagcgcggcaaacaagccctggcgcccggccaacaagatcaccaagaagccaacgaccacgccgggaaacgccagcggaaacgtgagcaacgccaccagcgccgagcgcccgaaaaactgctgccgggcgagaaacacgccgctgataccgccgatcaacagcgccaccagcgtcaccaccacggccaggaccaacgtttgccccaggctgcccaagtactgcgcgctgctgagcacctgccagtagccgctgccatggctgtcgcggctatcggcgccgagcgccatcaggtgcgccagcggcagcagccagaacgcgagcagcaccgcaaaggccggggccagcgcccaggctgcgtgtcttgccgatgctgccacttacttgacctcgttcaggtatcgggcggcgaaggcttcctgcacagcggccattttttcgtagtccaccacgccggcacgggcgtagtcgctgtcgggcaggaactgtgcggccacctcagctggcatcttcatcggccgtaccgggcgcagataggccttggcccagagcgcctggccttcgtccgacagcacgaagtcgaggaccttttctgcgttggcgcggtgcggcgcgttggccaccaggctcatcacgtagggcacgctgatgctgccttcctgggggatcacgaaagcgacgttggccttgtctttgtagcgggcgcgataggcgttgaagtcgtagtccaccaggattggcaactcgcccgacagcacccgcgcataagcggtctgtttgggcacgatgggcgcgtttttcgccagcttctggaagtagtcgatggccggcgcgaagttgtccaggtcgccgcccatggcgcggttgatcgccaccgccgagacgtacccgacaaacgcgctggacgggtcgaggtaaccgaccatgcctttgtattcaggcttgagcaggtcggcccagctttgcggcaccggcagaccgccgagtgcatcgacgttgaccatgatgcccaaggtgccggagtgaatcgcgaaccaatggccggccgggtctttcagcccggcgggaatctgctcccaggccttgggtttgtaggtgtcgaccacctcggccttttgcgcctgcaggccgaaggtcacgccgtagtaaacgacgtcggccaccggtgcggctttctctgccaccaactgtgccagggattggccggagttcttgttgtccagcggcacttgcacacctgtgctggcggcgatggccttgagctgggtgccccagtcggcccagtccggcgggcagttgtagcagatcgcggtttcggcggcctgggccaggctggccgaaccgcacagcagcacggctgccagggttttacggagtgcgcgcatcaggggtttcctcgtggggttgagtgctttcgcccggccggatatggcaaggcaggcagtgagacgtcggggcattgccggcgatctgcgccagcagttggtcaatcacagtgctggcgagcagcgcgatgggctgcaccacgctgcacagggtcgggtgcatctgggtgccaaggctgatgccatcgaagcccatcaccgagagttgcccgggcacgttccaggcgttgcgacgcagttcggcgatcaggctgatcgccaggaagtcgttggaacacaccagtgcggagggtgcctcagggccttgcagacaaggttcgatggcggcgaattcggcctgggtatgggctggcatttcgatcactgtgcggggctcgaggccgtattcgcgcatcgcatcgcaatagccggcgtagcgcaggcgcgcacggtccgactgcagcgcggggccggcgaccatactgatgcggcggtgcccggcttccagcaggtagcgcgtggccagggccatgccggcgcggttgtccaccgacacggcgctgtagttggggttgctgggttggtggtaggccaacacaaacggggttttctcagtattcaggctgctgagcaccacgttgctttcagcatcggtgaccgtcagcaccaggccgtccacgcgctggcgcaacagctcttccaccacaatgctttcgcgctcgctgctgtagtcggtagtcgccagcaacaggctataaccacgtaaccgtgccgcgcgctccatggcctggaactgttcggcgaacaccgggttgagcaggttgggcaccaccacgccgatcaactgggtggtttgcaggcgcaattggcggcccagcagattgggccggaagcccaactcgcgggcggcggcgaacacctgctcacgggtggtcgggcgcacctggtcgggggaggcaaaagtgcgggcggcggtggcgcgggataccccggccaaccgtgctacgtctttcaagtcagtcattgtcactcgcttgagatcgatctcattggcgaggacagtaatggggaaatgtggcagttcggcggtaaggtgatgacagtttgatgtcgatgaacccgatagacaggggccaaactgtgggagggggattgcccccgatggcagtgggtcagtactggattgggtggctgacacactgctatcgggggcaagccccctcccacattggaccggtgcccatccatagatggtcatactcggagggtagggtcacaaaccgggcgcgcaaaatccgcccactaacctttcgattcgatccaagtgcgggcacaatgcgtgtccttttttggcaggcaccgccgcaggctctcaaaaatgatcaaaacgccgtactacctcatcgataaacagaaacttctggtcaacatgcagaagattgcttacgtgcgcgaacagtccggcgccaaggccctgctggcgctcaagtgctttgccacctggtcggtgttcgacctgatgcagcaatacatggacggcaccacctcgtcgtcgctgtacgagttgaagctcggccgccagaagttcgaaggtgaggcgcacgcctacagcgtggcctgggccgacgatgaaatcgaagagatgctggataactgcgacaagatcatcttcaactccatcagccagctgcagcgttttgccgaacgttccgagggcaagacccgcggcctgcgcgtcaacccacaggtgagcagctccgactacctgctggccgatccggcgcgtccgttcagtcgcctgggcgaatgggacccggtgaagatcgaaggcgtgatcgagcagatctccggcttcatgttccacaacaactgcgaaaacggcgacttcagcctgttcgacaagatgctcggcgtcatcgaagaacgcttcggcgcgctgctgcacaaggttgagtgggtcagcctcggcggcggcatccacttcaccggtgaagactatgccgtggacgcgttctgcgcgcgcctgaaggcgttctccgagaagtacggcgtgcaggtctacctggaacccggcgaagcggcgatcaccaacagcgcctcgttggaagtgaccgtgctcgacaccctctacaacggcaagcacctcgccgtggtcgacagctccatcgaagcccacctgctggacctgctgatctaccgcctcaacgccaagctggcgccgagcgacggtgaacacacctacatggtgtgcggcaaatcctgcctggccggggacatcttcggcgagtatcaatttgatcgtccgctggccatcggcgatcggctgtcgttcatcgacaccgcaggctacaccatggtcaagaaaaactggttcaacggcctgaaaatgccgtccatcgtagtgaaacaactcgacggtactgtcgaggtggttcgtgaatttggttacgacgactacctgtccagcctttcgtaagctggcggataaaggagagataaagcaattgaaaaagaacgttcttatcattggtgcaggaggtgtcgccaaggtggtggcccacaagtgcgcgcagcacaacgacgaactcggtcgtattgctatcgcgtcgcgcaacatctccaaatgccaggccatcatcgacagcgtcaaggccaagggtagtctcaaggtgcccgccgatatccaagccttcgcgctgaacgccctggacgtggaagcgaccaaggccctgatccgcgagacccaatcgcagatcgtcatcaacgtcggttccgcgttcctcaacatgtcggttttgcgggcctgcatcgacaccggcgttgcgtacctcgacaccgccatccacgaagagccgggcaaggtctgcgagaccccgccgtggtacggcaactacgaatggaaccacctggaagagtgcaaacagaagaacatcacggccatccttggcgtgggcttcgacccgggtgtcgtcaacgcgtatgccgcgctggcgcagcaacagcatttcgaccgcattgattcgatcgacattctcgacgtcaatgccggctcccatggcaaatatttcgccaccaacttcgacccggaaatcaacttccgcgagttcaccggacaggtgtggagctggcagaacagccagtggaccagcaacaccatgttcgaagtcaaacgcaccgatgacctgccggttgtcggttcgcagaacctctacctcaccggtcacgatgaagtgcactcgctgtcgaaaaacctcgacgtgcccaacgtgcgtttctggatgagcttcggcgaacactacatcaacgtgttcaccgtgctgaaaaacctcggcctgctctccgaaaaaccggtcaccaccgccgaaggcctggaagtcgtgccgctgaaactggtcaaggccgtactgcccgacccgtcttcgctggcaccgggctacaccggcaagacctgcatcggtgacctggtcaagggcaccaagaacggccagccccacgagatgttcatctacaacgtggcgtgccatgaagaagcctttgccgagaccgacagccagggcatctcctacaccgcaggcgtgccaccagtggccgcagcgctgctggtggcccgtggcgagtgggatgtgaagcacatggccaacgtcgaggaactgccggccgaaccgttcctgaaagcgctggatgtgatggggttgccgactcgaattaaagacgagaacggtgatcgggcttgggatgcgattgcctgataggcgatagcggcccgaacaaaaaaatgcgccctctggggcgcattttttgtttggggcaaacacagccctcacgaccaatgaggtcaactgtgggagggggcttgcccccgatggcggtgtgtcagtcaacacatatatcagcagacacactgctatcgggagcccccccctcccacagttgaatttccagagtctgttattccagattccgagcctaattgctcagtggccttgaacactgcaaaagcgccgttacaccgtgcatgacctactgcccccaaacacttaatttggagtgacgccctgtggtggtagtaaccaatgccgtgtagtggtccaccccaaaaagaccctcgcaccgtcggcggtctgaccttgctgagacaacacttcgcctgccgcagccttgcgcaaaccgatcatcactggcagaaacctttcgcggaaagcctgtggttgcttagcgaaacaagcctcgatcgacttcaaggcctctttgcattcatgctcctcaagcattgcgaggtaaaacaccatctggcgccaggcataagctgtgttcttgagcataatcaatcgagcatgatagagaccggtgtgcatctgctgccgtttgcagacccactcaaaactcgcctgggccatgccccctagccgagtactcagcaaacctttcaacccgagctcgtcgaaaatcagcgcaaggttttgcgtcgttaaaatctgctgttgctcaaggatcgtgccattggttgcagggtgccaagtgcccagctctgccccagcccgctttgcgcataaggcagcaaaagcctcacttgcacctcgcgcacgccgtcgccctcttgtgacgaagccggccagttcgtcggtatcgatagagtagtaacgtgcataaagggagcctgcgattacccgactcgctcgccgagcagtgtcagcgaacttggttgagaactgccccatgaagatatctgcagcgacctcctccacaaagggaaggtccagctccgcagtgtccaccagcgttccaaattcctggagaagcttgttaggaaggatggcgtaggggaacgcatgaagcgtcaatgccgaagactcaacgagagcctggctcgctgcacccgctgccccggtacctgactgtcgatcaccctcaatggctgcaatccaaggcaactcactgaagcccacctgacgttgaagattcaatagcaacaacgaacgcctaaggcggaaagcctgataggtggaggcatagaccttcctcaacgcttcgtcgtgcagccctgcgctactcagctgtgcggtcatcgcgggcagtactcgtgcgactgtgtcacccgaagtaatcagcccatgctcaatcaactccctgattgttccgctgcgacagcgttgaacacgtcgcagaattggcgcgggtatcgcgacaccttcgcccagtgcgcaatccaccgcctcttgaacatcaagcggcttggccaaatcggcaaaatcaaagatgccactgtgtgcggggtacttagagaggcgctttgcgacggcacgcgcgatcagatgatgctctggtcctgatacctggcgaagctggtcctcccggaacgcgaggtgagagccggaagccggcgcaccatgtttgcgcacaaagtcatcgactattcgccgtatgcgacccacctgacgccctgtaagcgactctgcatcgcgagagcattgctctagcaacagaaacaattccgctacacgatcaggagagcgtttgttgatcccgagttgttcataacgcatagccaattcggctgcctgttcgtgccactttgccgggaagatacggcatggccagcccacctggtacgtcaggaggaaatgcgcgacggctgaatcataaagaggtagacgggcttcgatcgcctgtttctgagcaacgatttgagcccgcggtggcaaggttgaaagtaactgcttgacctcacctgcattggcgatgtggacctgcgtagctgataccggtagctgtgcggacgttgccggaaagaaacgcaatcggtcgaaaaacggaacaatcacgtctagcagtgccctggcctcgtcgttgcgacgctggctcgacagccatgccacggtcagtaacgcggcttcttccggaacatcaacgcgatagtcacaacgggtcagacgctgttgcagatgttcaaggccttcgtccgtcagatgccaagcgttgagatccagtcgctcaaaccctctgcgaatgccggaaatagaagcgaccaattcacgctcatagtcagttaactcgccacccgccaacaggttgccggtcgcaaagccgcctgtaatgacttccagcgtcacccagacaggtatctcggcaagcggggttcgcgagccatactcggcggtgccttgcagcatgtgcgcaatcacttgttgccactgtgagatacgtctgtgggcattgaatcgggcgagagggccacgggtttgatcgtgtgcaatcaatgccttggaaagttggaagaccgcataacccgcgtccatgccagtcactccgtttgctctggagaggtatccagattgccttttaatgtgatgggtccggaggctggattcgaaccagcgcccacccggttaagagccgagtgttctaccgctgaactactccggaacaggggcgcattgtcgggcaaccgctaaggaatgtgaaggtcacagatggtcattaagcaatggctgacgacactgctctttttttgtcagaaccagcgggaattattcaagtagcggcgtgccagcagatgtattcggtactgttacaccgttgctgagataaacacagccctcacgaccgatgaggtcaactgtagttggcttgccggcgatgtcggtgtgtcatttgtgcatttgttactgacgtatcgctattgccggcaagccggctctacagttgatttgcagcggatgttggagtggagttattcgaggttacgggctgagttactcagcgctctcgaacactgcaacaacgccggcgccaactgcttctccgcatccgccctactccaccgactggtcggcgccaccacatgcaccgccgccaccggtcgaccattggcacccagcaccggcgcaccgatggtcatatcgcccaggaacagctcttggccgttcactgcatagccctgttcgcgtacctgttgcaacgacgccatgatttcgtcgacttcagtcagcgtctggctggtgtgggcaatacgctgactgttctcgatcaacaccagcgcttcctcctgcggcaacgcgctcagataggcgcgtcccgacgccgtgcaatacatcggcacccgcgagccgatcggcatgtgcacgggtacgaagcccgagctgacgaaccgtgcgatgtaggtcatgtcgtagccggctggctcggtgaggcacgaggtctcgccggtcagccgggtcaactccgacaggaacggattcgccacctcaatcaacgaatgcgcatccaggtaactgaagcccagctccagcacccggggtgtgagttggtaatgccgggtgcgggagtgtttccgaaggtaacccaggctttcgagggtaaacaccatgcgctgggccgagcttttggtcatgccggcggcctcggccacctctgcaaggctcatgctgcggcgctgtgcgctgaatgccttgagcaccgacaggcctttttccagggattggttgtgcagactgttgcgttcttcggacatggcggactcacggtcaggtcgatcaggcgtggcgatatttttaacccaaatcacagaaatagaccattaaatatcgcatatcgatacgaatggttcattttttctattttccatagcgctatacgatttttattgatcgaaatggcacagagcttgcgatttcatcggcagccgcttgcggtactgactttccgttttccttctggagtaacccgatgaacagtctttcgcccttgtttcgccgccttgccttcggtctctgtgccacgttctgcgtcagcgttgtgcacgccgagagtgcgtcctcgtacaaagtcggtgcaacagccagtggttcgccgtttacctttctcgacatcaagagcaacagcatccagggcgtgatggtcgacgtggccgaggcggtgggcaaggccggcggctttaccagccagattgagcagaccaacttcgccgcgctgatcccctccctcacttccggcaagttggattttatttccgccggcatgctcaagaccgaagaacgcaccaaggtcgttgacttcagcgctccggtgtatgcctacggtgaaggcctgatcatcaacgccgacgacaacaccgcctaccctgacctcatgcctctcaaggaccaagtggtcggcgtgcaggccggcactgtcttctatgaccagttgaacaagctcggcatcttcaaggagatccgcacctacgactccatcggcgagatggtccgcgacctgtccctgggccgtatcaaggccgccgtgggtgaccagccggtggtggcctaccagatccgccagaagctgttcaaaggcgtgaaactggcgccggactacaagcccactaatgtcggtgaagtgtgcctggtggtgcgcaagggtgacgcgcaaaccctggagcgcctgaacaccgcgatcgccagtatcaaggcggacggcaccctcgacaacatcctcaagaagtggggcctggatacccaggtgcgcccatgaacccggcggagttcctgcaaaacgcccaggacttcttgccgatcctgctgcaaggcgcgtgggtgacgattcagatcaccgtgctgtcattcctgctcagcagcgcgatcggcctggtgctggcgttgctcaagctgtcgccgatccgtgcactgtcgtgggcggcgagcaccatcatcaacgtgatccgtgggctgccgatcatcgtgcagttgttctacatctacttcgtgctaccggacatgggcgtgcacctcaccgcgttctatgcgggcgtgatcggcatgggcatcgcctactcggcgtaccaggccgagaacttccgcaccggcatcattgccgtcgaacagggccagcgcgaagccgccgaagcactgggcatgcgctcggcgctgatgatgcgccgggtgatcctgccgcaagcctttcgcatcgccttgccgccgtatggcaacacgctggtgatgatgctcaaggactcctccttggtgtccaccatcaccgtcgcggagatgacccgccagggccaactgattgcctcgtcgaccttccagaacatgaccgtctacaccctggtcgccctgctctacctgctgatgagcctgccgctggtgtatggcctgcgccgcatggaacagcacctgggccggaggaaaaaagcatgatcgagatacgccaactgcaaaaacactacggcagccaccgcgtgctgcacggcgtcgacctggacgtggccaagggcgaagtggtgtgcctgatcggcccctcgggctcgggaaaatccaccttgctgcgctgcatcaacgcgctggaagcctacgacggcggccacatcaacgtgttcggcgaaaccgtgcagcgcggcagcaagaccgtgcacgccctgcgcagccgcatgggcatggtgttccagcgcttcaacctgttcccccatcgcaccgtgctggaaaacgtgatggaaggcccggtgtacgtcaaaggcgaaccgcccaagcaggcccgtgaagaagccctggtattgctggaaaaggtcggcctgagcgccaaggccgacgcctacccggagcagctctccggcggccagcaacaacgcgtggccatcgcccgcgccctggcaatgaaacctgaagccatgttgttcgatgaacccacctcggccctcgaccctgaactggtcggtgatgtgctggcggtgatgcgcaccctggccgatgagggcatgaccatgatcgtggtcactcacgaaatgggctttgcccgcgaagtggccgaccgcgtgtgcttcctgcatggcggctacatcgtcgaaagcgggccggccgaacaggtgctgggcaacccgcagcatgcgcggacccaggacttcctgcggcgcgtgctgcaccccaccggtaacacgcggagcctgtcatgaagtctttgtggtcagccacggctccatctgtggtgccgacgcctgcattgggcgagtcagtgacggtggacgtggcgattgtcggcgcgggatataccggcttgtcgacggcgctgcatttggccgagcgcggcgtcagcgtgtgcgtactggaggccaacgagccgggctggggtgcgtccggacgcaacggcgggcaggtcaacccgacgctcaaatacgacccgcagcaactggtgcagatctacggaccggagcgcgccgagccattgatctcgaccgtatcgagttcagccgacctggtgttcagtctgatcgaaaggcatggcatcgattgcgcgccggtacgcaaaggctggatgcaagtgtcgtacagcgaaaaaggcgtcgccgggttgcacgcacgggcagatcaatgggccaggcgcggtgtaccggtgcagcggctggatgccgcagcggtggcttcgcgcatgggcagtgaggcgtttgccggtggctggctggacggtcgcgccggggcgattcagccgttggcgtatgcccgtggcttggtgggtgcggcgttggcggcgggtgtgcggatccatgggcagagcgcggtgaccgggttgcagcgccagggttgcggctggcaattgcagacggctggcggtgcgcaggtcacggccgatcaagtggtgttggccaccaacggctacagcggcaacctgtggccgggcatggcgcagagcatcctggcggcgaacagttttatcgtcgccaccaaacccttgagcgggcgcgcagcggacagcatcttgccggggcaggaaaccgtctccaccgcacaacggctgctgctgtactttcgcaaagacagccatggccgcttgctgatgggcggacgcgggctgttcaacgaccccacgtcacccacggatttcgcccacctggaacgctcgctggcgctgctgtttccgcaattggggccactggaattcgagtatcgctgggcgggccgtattgcgatcacgcgggacttcatgccccatgtgcaccagcccgcaccggggcttacattggcgctgggttgtaatggccgtggcatcgcgctgtgtaccagcctggggcagcaattggcggggcggttgtgcgacagcacggcggatttcgcctacccggtgacgccgttgcagcgcttgccgatgcatgggttgcagcggttttacattggcgcgggggtggcgtggtacagcttgctggatcggctcaatgtgagctgaacagagccctcactcacaccactccccatgtgagagtgggcttgcccgcgacagcggtgtgtcagccgctggatgtgctggctgatgtaccgccatcgcaggcaagccagctcccacactggatctccttttccgggagaacctattgcacacgtaaagcgattaatactctcaatcgccaacggcgatcgctcccatgaacggggcgcaccctcaaaacaccgaccacccaatccgctcactcaacaattccaacgccttcatccccgccagcgagttccccgccgcattcagctccggcgaccacacgcacaccgtaaactgccccggcaccaccgcgacaatcccgccccctaccccgctcttgcccggcaagcccacgcgataggcaaaattgcctgcctcgtcgtacagcccgctggtggccatgatcgagttgacctgcttggtctggcgcgccgtcaaaatctgttcgctgctgtgggcgctcacgccttcgttggccaggaagctgaacgccctggccaagtccaggcagctcatctgcaaggcgcagtagttgaaatagctgtgcagcaccgcgtccacgtcgttgtggaagttgccaaaggatttcatcaggtaggccatggccgcgttgcgggcaccgtgctgggcctcggattcggcgacgacgctgttgaccaggatctgcgggttgcccgacaggcgccggacgaaatcgcgcatcgacaagatcggcacggcgaagcgcgattggttgatgtcgcagatcaccagcgcaccggcgttgatgaacggattacgcgggcggccacgttcgaattccagctgcaccatggagttgaacggctgcccggaaggctcgtgccccaggcgctcccagatggtttcgccaccgtggtcgatggcctgcaccaggctgaacaccttggaaatgctctgcaccgagaacagcgtgtcggcgtcaccggcgcagtaggccgagccgtcgttgccgtacacggcgatgcccaattggttggcaggcacatcggccaatgccgggatgtaatcggcgactttgccgaggccgatcagggggcgcacttcgtcgaggatcgactccagcagcgcctgcatgtcttgtccagtcatctgtctttgaatcggtggtaagcggggcgcggaggatacctgaaacacgcaggtcaagcttcatcagggccgcttcgcaccccaacacgggacaagcccgctcgccacagagggagtggggactccctcgccacagctcgatgttgcgtgcgctcaaaagtgcgccacatccgacacccgctcatccagcacatcccgcgccagcgcccaggcccggtccctggactccaccaccagcagcggatagccccaggccttgccgaacatcgcggcaaacggcttgagtgccaggcgctgcgcggcactgggttccacctggatcatgcctttgacataggtgcgcagcgcctgcttgtttttcttcatccagatcgacgcttgcttgcgctcctcatgggagtgttcgtgattgttctcgtccacggatttttcgtgcagcagcaggaagggttgctggcgggccagcaggctttcgaacacggcgaaggcatcctccggcccgccttcattgggcgcatcaaagacgattttcaccaccgggaatgttgaactgtcgagtcgcatggccgagctccttgttgagaattgatctcactataagggccagaccactggacggcattgcacagaatagccagactgtttcgcaattcagccaacctgcgatcccttgtcatgaaacaccatcgcctggaaatgcacgatccgtcactgtccagagacgccgacgtattcccccgcgccgtagtggccgtaggggccaccgccacgtcggatacctgggaacatacccagcatgcccatcgcaaaggccaactgatgtacaccttgcgcggggtcatccattgcgagattgaggccggtatctggatcgtgccgccgcaatgcgcgctgtggattcccggcggcacgccccacgcggcacggggggctggcgctgcggaagtctattgcctgttgatcgaccccgatgccgcctgcgccctgccccggcaatgctgcacgctggcggtgtcggccctgttgcatgagctgatcagcaaggcggtgagtttcccgcaactgtatgacgagcacggcgcccagggccgtttgatcagtaccttgctggatgaattggccgtcgcgcctgttgaagccctgcacctgcccatgccacaagatccgcgcctgcgtcgcctggccgacagcctgctggctgaaccggcggacaagtccaccctcggtcaatgggcggtgcgcatcggcatgagcgaacgcagcatgacgcgcctgctgctggaggaactgggcctgagttttggccgttggcgtcggcagttgcatgtgatcctgtcgctgcaacgcctggccaggggtgagagtgtgcagcgcgtggccctggacctgggctatgagaacgccagtggttttatcaccatgttccgcaagaccgtgggccagccgccggcgcgttatctggcggaccgcgccggggccttgcactcgctggcgccggcgacgattgcgctgaactgaaggtattgcctacccggatctgcgggcctgctcgccacacagtcaactgtccagatcagccaagcccaaatgctcacgcaacgtcgccccttcatacgcggtgcggaacagccccttgcgctgcaaatgcggaatcacgctctcgacaaactccgagaacgagcccggcaaataccccggagagatcacaaacccgtcgcaaccgccctgctcgaacaactcggccagttgatcggcaatctgcgcgccggtacccaccaattgcggcacacgtacgctgctggcgaagatgcgtccgagttgctccaaggtggtttgcgggccttgcatcaacagcttttcagccgccgccgggtggatcagcggcgactgggcgatctcggccagcgtcgccgagagcgggaatggcgaaagatccacattcaactgcgaagccaacgtcaccagccccaattccggacgggccaatgcattgtgctggtcgcgcttggcacgggcctcagcctcgctgccgccaatgaacggcatcaccgccgtgagcactttgcaactgtcggcgtcacgcccctgctgcaccacctgggcacgcacgtcatcgcgaaacgcacgcatggccaccaagtgcgggtgaatggtgaaaatcgcctcggcccaacgcgcaccaaagcgccggccacgcccggaagaaccggcctggatcagcaccggtcggccctggggcgtgcgcgggatattcagcgggccttcaaccctgaaccattcgccctggtgctgcaccgaacggatcaatccagggtccgccagtacgccgctttcgcggtccagtttcagcgcgtcctggccccagctgttccacagtttcaacgcgacttcgacaaactcatcggcgcggtcatagcgcaggtcgtgctccaggtgcttgtccttgccgaacaggcgcccttcgctgtcgttcatcgaggtgacgatattccacgccgcacggcccttggacaggtggtcgagggtggcaaattcacgggcgatgtgcgccggttcgtaataggtggtggaccgcgttgcacccaggcccagcttgctggtcttgccgaccaggtaagagaggatcggcaacgggtccaggcgcgtggcgtcctgggcgccgtagcgcaaggcgaactcgcgggagccgcccatctggtcgcccacggccaggcggtcggcgaagaacaggaagtcgaacaacccctcctccaccaccttggccacccgtgcgtagtactcagggtcgaggtaattgccaacggtttccgggtggcgccataccgcatggctgtgcacgaccggcccactcagcaggaacgcggataaatggatctggcggctcatggcttgggcgtccacacgttgatgtcgttgatcttcaacgccctggggatcagcttggcggcgtagtaggtgtcggcgatgcgctgttgctcggcgaggtggtccagcttgaccgggatgatgtcgtagctgcggcggctattggcgcgctccaccgtggccggggggatattgccccacagcgggccaaggatggcggcggcttccttgggatgggcctttacccattggccggtctcgcgcagggtgtcgaaggtcacctgcaacacgtccgggtgggccttggcgaactttgtcgtcgccaggtagaaacggttgtagtcggccaggccgttcttgccgtcggcgatcacccgtacatggtgatccagctgttgggtggcgaggaacgggtcccagattacccacgcgtcgacactgccattggcgaacgccgcgccgccatccggggcttccaggtaacgcggggtgatatcggccagggtcaggccggcctttttcagggccgagatcagcaggtagttgctgcccgaacccttggacacggcaaccgtcttgcccttgagctcggcgatgctgtggatcggcgacgtgtcctggacgatgatcgcctgggcgcccggcgatgcgttttcctgggcgtaataggtcagcggtgcatcggcggcctgggtgaacagcgcgaaagcgtccgccacatcggcgtgcaggtcgacactgccggcgttcagcgaactgagcagaccggtgctgaattcatgccagttcaccgtgaaccccaggggcttgaggcgctgttccaactggccattttgcttgagcaggatccacagcgtggatgagcgctggtagctgatatccatggtttgctcggcctgggccgccgtggcggcgaacagcaggctggcggcgacgattaggtttttgaacgtcatgggaggccttggcgaggaagaaatgaagggcgctgcttatgccaaaaaaccacgtcaggcctggcaataaagcttgttcaattatattaacgatgagaaatgatgaaagaatcttataattctatggttatgcccaattcataggcggcagggaaaagcgtcctaagctcagatcgaaagagtatttaacgaatagtttttagaactttaagctcaggcctatttcgtcacagatcgagctcgccatgtccctacgtcaccccttcgccgcactcctcggcttgctggctctgtccgtcgccatcagcgcgcaggcccaggaaaccgtacgcatcggttaccagaagtcctcgaccctgatcaccctgctgaaaacccagggcaccctggaaaaagccctcaaggccgacaacatcgacgtgagctggcacgagttccccagcggcctgccgctgctcgaagcactgaacgtgggcaacgtggacatcagcgccgacgtggccgacaccgtgccgatcttcgcccaggcagcccaggccaaactcacctacttcgcccaggaagccccctcgccttcggcccaggccatcgtggtacgcaaggactcgccgatccagaacctggcggacctcaagggcaagaagatcgccgtgaccaaggccgccggcacccactatttgttgatcgccgcactggccaaggcggggctggccttttcggatatcgaaccggcctacctgtcacccgccgacggtcgcgcggcgttcgagaacaacaaggtggacgcctgggtcacctgggaacccttcctcaccagcgtgcagcgccaactgccaacacgcaccctggcggacggcgcagggctggccagctacaagcgctactacctgacgggtacgccgtacgccaaggcccacccgcaagtgttgaacgtggtgtacgcgcaactggaaaagaccggccaatgggtgaaaacccacccacaagacgcggccaaagtacttggcccgctgtggggcaacctggatgtcgcgacggttgaagcagccaatgcgcaccgcagctatcaagtgcagcctgtgacgattgatcagttgggcgaacaacagaaaatcgccgatgcgttcttcaaggcggggttattgcccaaggccgtggatgccaaggatgtacagacctggaagccttgaggcagccattgtaggagctggcttgccggcgaaagcgctgggtcagccgcttttccgttgctgatctaccgctatcgctggcaagccggctcctacagggggcgtcattcgcaggcaaaaaggtgcccccccgtatcccccggtgtcagggtagttgtcgtgtcctccgctttttaaaagtattccgggggcggcaagagtaaggtcatgcctttctattcagaagaacgcaaagctgcgctgttgaaaatgatg
